United States Patent Application Publication US 2011/0165568 A1 - sequence listing, part 4

SEQ ID NO: 1695 - DNA, 5076356 bp, Escherichia coli (residues 1,269,090-2,538,178 of 5,076,356)
  Strain O55:H7
  modified_base (225)..(225): a, c, g or t
  modified_base (1111)..(1112): a, c, g or t
  modified_base (1607)..(1622): a, c, g or t
  modified_base (4457)..(4460): a, c, g or t
  modified_base (6633)..(6633): a, c, g or t
  modified_base (7135)..(7139): a, c, g or t
  modified_base (11714)..(11714): a, c, g or t
  modified_base (12007)..(12009): a, c, g or t
  modified_base (12012)..(12013): a, c, g or t
  modified_base (13584)..(13585): a, c, g or t
  modified_base (15530)..(15530): a, c, g or t
  modified_base (15818)..(15821): a, c, g or t
  modified_base (18780)..(18789): a, c, g or t
  modified_base (19304)..(19308): a, c, g or t
  modified_base (19732)..(19743): a, c, g or t
  modified_base (24367)..(24373): a, c, g or t
  modified_base (24782)..(24785): a, c, g or t
  modified_base (25579)..(25595): a, c, g or t
  modified_base (28480)..(28480): a, c, g or t
  modified_base (29283)..(29286): a, c, g or t
  modified_base (29291)..(29295): a, c, g or t
  modified_base (31649)..(31652): a, c, g or t
  modified_base (34426)..(34426): a, c, g or t
  modified_base (36376)..(36379): a, c, g or t
  modified_base (36381)..(36384): a, c, g or t
  modified_base (36889)..(36889): a, c, g or t
  modified_base (39884)..(39884): a, c, g or t
  modified_base (45140)..(45140): a, c, g or t
  modified_base (45551)..(45551): a, c, g or t
  modified_base (45915)..(45920): a, c, g or t
  modified_base (46403)..(46407): a, c, g or t
  modified_base (48459)..(48459): a, c, g or t
  modified_base (49809)..(49809): a, c, g or t
  modified_base (50356)..(50356): a, c, g or t
  modified_base (52612)..(52612): a, c, g or t
  modified_base (56077)..(56077): a, c, g or t
  modified_base (58998)..(58998): a, c, g or t
  modified_base (62027)..(62027): a, c, g or t
  modified_base (64105)..(64108): a, c, g or t
  modified_base (64241)..(64241): a, c, g or t
  modified_base (67678)..(67678): a, c, g or t
  modified_base (67797)..(67801): a, c, g or t
  modified_base (71722)..(71722): a, c, g or t
  modified_base (73394)..(73397): a, c, g or t
  modified_base (73688)..(73688): a, c, g or t
  modified_base (74659)..(74659): a, c, g or t
  modified_base (87797)..(87797): a, c, g or t
  modified_base (97642)..(97646): a, c, g or t
  modified_base (98093)..(98093): a, c, g or t
  modified_base (98096)..(98096): a, c, g or t
  modified_base (102287)..(102287): a, c, g or t
  modified_base (105479)..(105479): a, c, g or t
  modified_base (106453)..(106455): a, c, g or t
  modified_base (106458)..(106459): a, c, g or t
  modified_base (109656)..(109657): a, c, g or t
  modified_base (123248)..(123250): a, c, g or t
  modified_base (126289)..(126299): a, c, g or t
  modified_base (129221)..(129221): a, c, g or t
  modified_base (130490)..(130493): a, c, g or t
  modified_base (130923)..(130926): a, c, g or t
  modified_base (135751)..(135751): a, c, g or t
  modified_base (137716)..(137716): a, c, g or t
  modified_base (140865)..(140865): a, c, g or t
  modified_base (143774)..(143777): a, c, g or t
  modified_base (147543)..(147546): a, c, g or t
  modified_base (149125)..(149125): a, c, g or t
  modified_base (151097)..(151098): a, c, g or t
  modified_base (156722)..(156722): a, c, g or t
  modified_base (157927)..(157927): a, c, g or t
  modified_base (159008)..(159008): a, c, g or t
  modified_base (162533)..(162533): a, c, g or t
  modified_base (163259)..(163259): a, c, g or t
  modified_base (163398)..(163398): a, c, g or t
  modified_base (165153)..(165153): a, c, g or t
  modified_base (167388)..(167388): a, c, g or t
  modified_base (175680)..(175681): a, c, g or t
  modified_base (175684)..(175684): a, c, g or t
  modified_base (175965)..(175965): a, c, g or t
  modified_base (177693)..(177693): a, c, g or t
  modified_base (177719)..(177722): a, c, g or t
  modified_base (177724)..(177725): a, c, g or t
  modified_base (179857)..(179870): a, c, g or t
  modified_base (179961)..(179961): a, c, g or t
  modified_base (180353)..(180353): a, c, g or t
  modified_base (190146)..(190149): a, c, g or t
  modified_base (191703)..(191703): a, c, g or t
  modified_base (195215)..(195223): a, c, g or t
  modified_base (198174)..(198174): a, c, g or t
  modified_base (198179)..(198179): a, c, g or t
  modified_base (204512)..(204515): a, c, g or t
  modified_base (205797)..(205804): a, c, g or t
  modified_base (207917)..(207917): a, c, g or t
  modified_base (210045)..(210045): a, c, g or t
  modified_base (210819)..(210819): a, c, g or t
  modified_base (212694)..(212694): a, c, g or t
  modified_base (212776)..(212776): a, c, g or t
  modified_base (212965)..(212965): a, c, g or t
  modified_base (214546)..(214549): a, c, g or t
  modified_base (216428)..(216433): a, c, g or t
  modified_base (218731)..(218731): a, c, g or t
  modified_base (228787)..(228788): a, c, g or t
  modified_base (228790)..(228791): a, c, g or t
  modified_base (229036)..(229037): a, c, g or t
  modified_base (229040)..(229069): a, c, g or t
  modified_base (229154)..(229168): a, c, g or t
  modified_base (229208)..(229208): a, c, g or t
  modified_base (229215)..(229226): a, c, g or t
  modified_base (229412)..(229412): a, c, g or t
  modified_base (229728)..(229736): a, c, g or t
  modified_base (229739)..(229742): a, c, g or t
  modified_base (229828)..(229831): a, c, g or t
  modified_base (230070)..(230078): a, c, g or t
  modified_base (230311)..(230311): a, c, g or t
  modified_base (231196)..(231196): a, c, g or t
  modified_base (237010)..(237013): a, c, g or t
  modified_base (240337)..(240337): a, c, g or t
  modified_base (240732)..(240732): a, c, g or t
  modified_base (240744)..(240744): a, c, g or t
  modified_base (243277)..(243289): a, c, g or t
  modified_base (243525)..(243525): a, c, g or t
  modified_base (243527)..(243528): a, c, g or t
  modified_base (243532)..(243532): a, c, g or t
  modified_base (245081)..(245081): a, c, g or t
  modified_base (247553)..(247553): a, c, g or t
  modified_base (247879)..(247879): a, c, g or t
  modified_base (248819)..(248830): a, c, g or t
  modified_base (253042)..(253042): a, c, g or t
  modified_base (255707)..(255716): a, c, g or t
  modified_base (255719)..(255719): a, c, g or t
  modified_base (256708)..(256711): a, c, g or t
  modified_base (260660)..(260660): a, c, g or t
  modified_base (261192)..(261193): a, c, g or t
  modified_base (261196)..(261197): a, c, g or t
  modified_base (261199)..(261199): a, c, g or t
  modified_base (261205)..(261206): a, c, g or t
  modified_base (261208)..(261210): a, c, g or t
  modified_base (261940)..(261941): a, c, g or t
  modified_base (266146)..(266146): a, c, g or t
  modified_base (267741)..(267741): a, c, g or t
  modified_base (267796)..(267797): a, c, g or t
  modified_base (268132)..(268141): a, c, g or t
  modified_base (268537)..(268540): a, c, g or t
  modified_base (268542)..(268542): a, c, g or t
  modified_base (268544)..(268547): a, c, g or t
  modified_base (269632)..(269634): a, c, g or t
  modified_base (269812)..(269812): a, c, g or t
  modified_base (269863)..(269863): a, c, g or t
  modified_base (269872)..(269872): a, c, g or t
  modified_base (269914)..(269914): a, c, g or t
  modified_base (269956)..(269956): a, c, g or t
  modified_base (269971)..(269971): a, c, g or t
  modified_base (270076)..(270076): a, c, g or t
  modified_base (270552)..(270552): a, c, g or t
  modified_base (270736)..(270736): a, c, g or t
  modified_base (271053)..(271060): a, c, g or t
  modified_base (271415)..(271416): a, c, g or t
  modified_base (271418)..(271420): a, c, g or t
  modified_base (271424)..(271425): a, c, g or t
  modified_base (272354)..(272367): a, c, g or t
  modified_base (273879)..(273879): a, c, g or t
  modified_base (274206)..(274206): a, c, g or t
  modified_base (274218)..(274218): a, c, g or t
  modified_base (274262)..(274263): a, c, g or t
  modified_base (274268)..(274277): a, c, g or t
  modified_base (274290)..(274290): a, c, g or t
  modified_base (274520)..(274520): a, c, g or t
  modified_base (276072)..(276072): a, c, g or t
  modified_base (277861)..(277862): a, c, g or t
  modified_base (278820)..(278835): a, c, g or t
  modified_base (282709)..(282714): a, c, g or t
  modified_base (282716)..(282721): a, c, g or t
  modified_base (283381)..(283381): a, c, g or t
  modified_base (283843)..(283843): a, c, g or t
  modified_base (284031)..(284031): a, c, g or t
  modified_base (284034)..(284037): a, c, g or t
  modified_base (284549)..(284552): a, c, g or t
  modified_base (284555)..(284555): a, c, g or t
  modified_base (284906)..(284906): a, c, g or t
  modified_base (285347)..(285348): a, c, g or t
  modified_base (285435)..(285435): a, c, g or t
  modified_base (286072)..(286072): a, c, g or t
  modified_base (286092)..(286092): a, c, g or t
  modified_base (286347)..(286350): a, c, g or t
  modified_base (286488)..(286488): a, c, g or t
  modified_base (286495)..(286495): a, c, g or t
  modified_base (287082)..(287085): a, c, g or t
  modified_base (292203)..(292203): a, c, g or t
  modified_base (294246)..(294246): a, c, g or t
  modified_base (294298)..(294299): a, c, g or t
  modified_base (295226)..(295226): a, c, g or t
  modified_base (295860)..(295869): a, c, g or t
  modified_base (295871)..(295871): a, c, g or t
  modified_base (296561)..(296564): a, c, g or t
  modified_base (296724)..(296724): a, c, g or t
  modified_base (296941)..(296944): a, c, g or t
  modified_base (297024)..(297027): a, c, g or t
  modified_base (298421)..(298421): a, c, g or t
  modified_base (298681)..(298681): a, c, g or t
  modified_base (304726)..(304727): a, c, g or t
  modified_base (304729)..(304731): a, c, g or t
  modified_base (304734)..(304737): a, c, g or t
  modified_base (304763)..(304773): a, c, g or t
  modified_base (304775)..(304776): a, c, g or t
  modified_base (304890)..(304912): a, c, g or t
  modified_base (304916)..(304917): a, c, g or t
  modified_base (304963)..(304971): a, c, g or t
  modified_base (305015)..(305024): a, c, g or t
  modified_base (305072)..(305073): a, c, g or t
  modified_base (305152)..(305179): a, c, g or t
  modified_base (305204)..(305218): a, c, g or t
  modified_base (305263)..(305273): a, c, g or t
  modified_base (305275)..(305276): a, c, g or t
  modified_base (305280)..(305281): a, c, g or t
  modified_base (305343)..(305364): a, c, g or t
  modified_base (305399)..(305414): a, c, g or t
  modified_base (305416)..(305417): a, c, g or t
  modified_base (305464)..(305639): a, c, g or t
  modified_base (305667)..(305762): a, c, g or t
  modified_base (305777)..(305778): a, c, g or t
  modified_base (305780)..(305784): a, c, g or t
  modified_base (305786)..(305820): a, c, g or t
  modified_base (305822)..(305823): a, c, g or t
  modified_base (305848)..(305851): a, c, g or t
  modified_base (305853)..(305854): a, c, g or t
  modified_base (305876)..(305876): a, c, g or t
  modified_base (305885)..(305886): a, c, g or t
  modified_base (305897)..(305901): a, c, g or t
  modified_base (305912)..(305915): a, c, g or t
  modified_base (305922)..(305923): a, c, g or t
  modified_base (305948)..(306104): a, c, g or t
  modified_base (306140)..(306141): a, c, g or t
  modified_base (306145)..(306146): a, c, g or t
  modified_base (306149)..(306168): a, c, g or t
  modified_base (306200)..(306201): a, c, g or t
  modified_base (306207)..(306227): a, c, g or t
  modified_base (306230)..(306230): a, c, g or t
  modified_base (306268)..(306271): a, c, g or t
  modified_base (306273)..(306274): a, c, g or t
  modified_base (306280)..(306281): a, c, g or t
  modified_base (306358)..(306367): a, c, g or t
  modified_base (306403)..(306433): a, c, g or t
  modified_base (306443)..(306446): a, c, g or t
  modified_base (306764)..(306766): a, c, g or t
  modified_base (307285)..(307286): a, c, g or t
  modified_base (307320)..(307327): a, c, g or t
  modified_base (307386)..(307387): a, c, g or t
  modified_base (307389)..(307391): a, c, g or t
  modified_base (307527)..(307537): a, c, g or t
  modified_base (307564)..(307568): a, c, g or t
  modified_base (307595)..(307634): a, c, g or t
  modified_base (307665)..(307666): a, c, g or t
  modified_base (307672)..(307683): a, c, g or t
  modified_base (307707)..(307761): a, c, g or t
  modified_base (307772)..(307775): a, c, g or t
  modified_base (307778)..(307779): a, c, g or t
  modified_base (307783)..(307861): a, c, g or t
  modified_base (307866)..(307868): a, c, g or t
  modified_base (307884)..(307885): a, c, g or t
  modified_base (307887)..(307887): a, c, g or t
  modified_base (307891)..(307891): a, c, g or t
  modified_base (307894)..(307895): a, c, g or t
  modified_base (307906)..(307933): a, c, g or t
  modified_base (307966)..(307985): a, c, g or t
  modified_base (307999)..(308000): a, c, g or t
  modified_base (308002)..(308003): a, c, g or t
  modified_base (308009)..(309178): a, c, g or t
  modified_base (309184)..(309184): a, c, g or t
  modified_base (309239)..(309278): a, c, g or t
  modified_base (309329)..(309402): a, c, g or t
  modified_base (309435)..(309435): a, c, g or t
  modified_base (309438)..(309477): a, c, g or t
  modified_base (309518)..(309936): a, c, g or t
  modified_base (310016)..(310017): a, c, g or t
  modified_base (310024)..(310033): a, c, g or t
  modified_base (310913)..(310919): a, c, g or t
  modified_base (310922)..(310924): a, c, g or t
  modified_base (311531)..(311534): a, c, g or t
  modified_base (311566)..(311569): a, c, g or t
  modified_base (311573)..(311574): a, c, g or t
  modified_base (311807)..(311808): a, c, g or t
  modified_base (311810)..(311813): a, c, g or t
  modified_base (312447)..(312457): a, c, g or t
  modified_base (313403)..(313416): a, c, g or t
  modified_base (313418)..(313419): a, c, g or t
  modified_base (313884)..(313894): a, c, g or t
  modified_base (314606)..(314609): a, c, g or t
  modified_base (314674)..(314674): a, c, g or t
  modified_base (314676)..(314680): a, c, g or t
  modified_base (316676)..(316692): a, c, g or t
  modified_base (316698)..(316699): a, c, g or t
  modified_base (317909)..(317909): a, c, g or t
  modified_base (324770)..(324773): a, c, g or t
  modified_base (326578)..(326581): a, c, g or t
  modified_base (330166)..(330167): a, c, g or t
  modified_base (330171)..(330171): a, c, g or t
  modified_base (330291)..(330291): a, c, g or t
  modified_base (330295)..(330298): a, c, g or t
  modified_base (331037)..(331037): a, c, g or t
  modified_base (331725)..(331725): a, c, g or t
  modified_base (332259)..(332259): a, c, g or t
  modified_base (332452)..(332452): a, c, g or t
  modified_base (334197)..(334200): a, c, g or t
  modified_base (342348)..(342348): a, c, g or t
  modified_base (343288)..(343288): a, c, g or t
  modified_base (344101)..(344104): a, c, g or t
  modified_base (344218)..(344218): a, c, g or t
  modified_base (344906)..(344921): a, c, g or t
  modified_base (346625)..(346629): a, c, g or t
  modified_base (346740)..(346741): a, c, g or t
  modified_base (346744)..(346757): a, c, g or t
  modified_base (350138)..(350138): a, c, g or t
  modified_base (350515)..(350518): a, c, g or t
  modified_base (360799)..(360805): a, c, g or t
  modified_base (360840)..(360840): a, c, g or t
  modified_base (360843)..(360849): a, c, g or t
  modified_base (360924)..(360937): a, c, g or t
  modified_base (361000)..(361001): a, c, g or t
  modified_base (361007)..(361009): a, c, g or t
  modified_base (361024)..(361037): a, c, g or t
  modified_base (361084)..(361085): a, c, g or t
  modified_base (361111)..(361112): a, c, g or t
  modified_base (361148)..(361216): a, c, g or t
  modified_base (361218)..(361221): a, c, g or t
  modified_base (361249)..(361264): a, c, g or t
  modified_base (361267)..(361267): a, c, g or t
  modified_base (361272)..(361273): a, c, g or t
  modified_base (361324)..(361339): a, c, g or t
  modified_base (361372)..(361373): a, c, g or t
  modified_base (361386)..(361407): a, c, g or t
  modified_base (361444)..(361472): a, c, g or t
  modified_base (361501)..(361502): a, c, g or t
  modified_base (361508)..(361508): a, c, g or t
  modified_base (366317)..(366317): a, c, g or t
  modified_base (368420)..(368420): a, c, g or t
  modified_base (368664)..(368667): a, c, g or t
  modified_base (368683)..(368686): a, c, g or t
  modified_base (370850)..(370851): a, c, g or t
  modified_base (370853)..(370854): a, c, g or t
  modified_base (370951)..(370951): a, c, g or t
  modified_base (371696)..(371696): a, c, g or t
  modified_base (373758)..(373758): a, c, g or t
  modified_base (373761)..(373761): a, c, g or t
  modified_base (373764)..(373767): a, c, g or t
  modified_base (374657)..(374657): a, c, g or t
  modified_base (377547)..(377547): a, c, g or t
  modified_base (377828)..(377828): a, c, g or t
  modified_base (378755)..(378755): a, c, g or t
  modified_base (382559)..(382560): a, c, g or t
  modified_base (386132)..(386132): a, c, g or t
  modified_base (389637)..(389637): a, c, g or t
  modified_base (389641)..(389642): a, c, g or t
  modified_base (389646)..(389647): a, c, g or t
  modified_base (389735)..(389735): a, c, g or t
  modified_base (389776)..(389785): a, c, g or t
  modified_base (389830)..(389831): a, c, g or t
  modified_base (389834)..(389877): a, c, g or t
  modified_base (389955)..(389960): a, c, g or t
  modified_base (389962)..(389962): a, c, g or t
  modified_base (390778)..(390778): a, c, g or t
  modified_base (391623)..(391625): a, c, g or t
  modified_base (391627)..(391628): a, c, g or t
  modified_base (393297)..(393303): a, c, g or t
  modified_base (393330)..(393330): a, c, g or t
  modified_base (394648)..(394648): a, c, g or t
  modified_base (398494)..(398494): a, c, g or t
  modified_base (405814)..(405814): a, c, g or t
  modified_base (406131)..(406134): a, c, g or t
  modified_base (409507)..(409538): a, c, g or t
  modified_base (409540)..(409541): a, c, g or t
  modified_base (409545)..(409546): a, c, g or t
  modified_base (409585)..(409594): a, c, g or t
  modified_base (409597)..(409598): a, c, g or t
  modified_base (409600)..(409601): a, c, g or t
  modified_base (409699)..(409720): a, c, g or t
  modified_base (409804)..(409805): a, c, g or t
  modified_base (409807)..(409808): a, c, g or t
  modified_base (409817)..(409817): a, c, g or t
  modified_base (409994)..(409994): a, c, g or t
  modified_base (410767)..(410767): a, c, g or t
  modified_base (412002)..(412002): a, c, g or t
  modified_base (414113)..(414115): a, c, g or t
  modified_base (420680)..(420680): a, c, g or t
  modified_base (422928)..(422928): a, c, g or t
  modified_base (424581)..(424587): a, c, g or t
  modified_base (425009)..(425009): a, c, g or t
  modified_base (430568)..(430568): a, c, g or t
  modified_base (431238)..(431238): a, c, g or t
  modified_base (431673)..(431674): a, c, g or t
  modified_base (431712)..(431712): a, c, g or t
  modified_base (431714)..(431715): a, c, g or t
  modified_base (431718)..(431718): a, c, g or t
  modified_base (431721)..(431722): a, c, g or t
  modified_base (431724)..(431733): a, c, g or t
  modified_base (431801)..(431812): a, c, g or t
  modified_base (431870)..(431871): a, c, g or t
  modified_base (431880)..(431881): a, c, g or t
  modified_base (433497)..(433500): a, c, g or t
  modified_base (435245)..(435273): a, c, g or t
  modified_base (436838)..(436839): a, c, g or t
  modified_base (437180)..(437188): a, c, g or t
  modified_base (437246)..(437246): a, c, g or t
  modified_base (437254)..(437254): a, c, g or t
  modified_base (444573)..(444574): a, c, g or t
  modified_base (445269)..(445272): a, c, g or t
  modified_base (446567)..(446567): a, c, g or t
  modified_base (446570)..(446570): a, c, g or t
  modified_base (448260)..(448260): a, c, g or t
  modified_base (452260)..(452260): a, c, g or t
  modified_base (453631)..(453633): a, c, g or t
  modified_base (455001)..(455002): a, c, g or t
  modified_base (456601)..(456602): a, c, g or t
  modified_base (456706)..(456709): a, c, g or t
  modified_base (457324)..(457325): a, c, g or t
  modified_base (459190)..(459192): a, c, g or t
  modified_base (459509)..(459510): a, c, g or t
  modified_base (459932)..(459933): a, c, g or t
  modified_base (459935)..(459935): a, c, g or t
  modified_base (460101)..(460101): a, c, g or t
  modified_base (460302)..(460302): a, c, g or t
  modified_base (461957)..(461958): a, c, g or t
  modified_base (463755)..(463755): a, c, g or t
  modified_base (464450)..(464450): a, c, g or t
  modified_base (469521)..(469528): a, c, g or t
  modified_base (469534)..(469534): a, c, g or t
  modified_base (470340)..(470343): a, c, g or t
  modified_base (473677)..(473677): a, c, g or t
  modified_base (475254)..(475256): a, c, g or t
  modified_base (480476)..(480476): a, c, g or t
  modified_base (482682)..(482682): a, c, g or t
  modified_base (483928)..(483928): a, c, g or t
  modified_base (483936)..(483936): a, c, g or t
  modified_base (484962)..(484962): a, c, g or t
  modified_base (485004)..(485004): a, c, g or t
  modified_base (486932)..(486938): a, c, g or t
  modified_base (486940)..(486940): a, c, g or t
  modified_base (486943)..(486944): a, c, g or t
  modified_base (486946)..(486946): a, c, g or t
  modified_base (487275)..(487284): a, c, g or t
  modified_base (488394)..(488394): a, c, g or t
  modified_base (489172)..(489178): a, c, g or t
  modified_base (489695)..(489698): a, c, g or t
  modified_base (494041)..(494041): a, c, g or t
  modified_base (495979)..(495986): a, c, g or t
  modified_base (497052)..(497052): a, c, g or t
  modified_base (498411)..(498411): a, c, g or t
  modified_base (502101)..(502101): a, c, g or t
  modified_base (504009)..(504020): a, c, g or t
  modified_base (504027)..(504027): a, c, g or t
  modified_base (504412)..(504412): a, c, g or t
  modified_base (506096)..(506096): a, c, g or t
  modified_base (507368)..(507373): a, c, g or t
  modified_base (514651)..(514651): a, c, g or t
  modified_base (515641)..(515641): a, c, g or t
  modified_base (517751)..(517751): a, c, g or t
  modified_base (521970)..(521970): a, c, g or t
  modified_base (523669)..(523672): a, c, g or t
  modified_base (524444)..(524444): a, c, g or t
  modified_base (528416)..(528418): a, c, g or t
  modified_base (528721)..(528724): a, c, g or t
  modified_base (530494)..(530494): a, c, g or t
  modified_base (540682)..(540685): a, c, g or t
  modified_base (543863)..(543864): a, c, g or t
  modified_base (555114)..(555114): a, c, g or t
  modified_base (557029)..(557029): a, c, g or t
  modified_base (559224)..(559224): a, c, g or t
  modified_base (560219)..(560223): a, c, g or t
  modified_base (565972)..(565972): a, c, g or t
  modified_base (567531)..(567531): a, c, g or t
  modified_base (568889)..(568889): a, c, g or t
  modified_base (571294)..(571294): a, c, g or t
  modified_base (573022)..(573028): a, c, g or t
  modified_base (574806)..(574806): a, c, g or t
  modified_base (578383)..(578383): a, c, g or t
  modified_base (581603)..(581603): a, c, g or t
  modified_base (581855)..(581868): a, c, g or t
  modified_base (585499)..(585503): a, c, g or t
  modified_base (585878)..(585887): a, c, g or t
  modified_base (586167)..(586167): a, c, g or t
  modified_base (586486)..(586489): a, c, g or t
  modified_base (589939)..(589939): a, c, g or t
  modified_base (591009)..(591009): a, c, g or t
  modified_base (591729)..(591729): a, c, g or t
  modified_base (591731)..(591743): a, c, g or t
  modified_base (591789)..(591792): a, c, g or t
  modified_base (592670)..(592670): a, c, g or t
  modified_base (592987)..(592987): a, c, g or t
  modified_base (594140)..(594140): a, c, g or t
  modified_base (594144)..(594148): a, c, g or t
  modified_base (594151)..(594152): a, c, g or t
  modified_base (594774)..(594774): a, c, g or t
  modified_base (595054)..(595054): a, c, g or t
  modified_base (595166)..(595166): a, c, g or t
  modified_base (595218)..(595218): a, c, g or t
  modified_base (595254)..(595254): a, c, g or t
  modified_base (595324)..(595324): a, c, g or t
  modified_base (595334)..(595334): a, c, g or t
  modified_base (595975)..(595978): a, c, g or t
  modified_base (598140)..(598141): a, c, g or t
  modified_base (598145)..(598153): a, c, g or t
  modified_base (602334)..(602334): a, c, g or t
  modified_base (604066)..(604067): a, c, g or t
  modified_base (606087)..(606088): a, c, g or t
  modified_base (606220)..(606225): a, c, g or t
  modified_base (607128)..(607128): a, c, g or t
  modified_base (609359)..(609359): a, c, g or t
  modified_base (611867)..(611867): a, c, g or t
  modified_base (615627)..(615642): a, c, g or t
  modified_base (615896)..(615897): a, c, g or t
  modified_base (616312)..(616312): a, c, g or t
  modified_base (618194)..(618194): a, c, g or t
  modified_base (618197)..(618198): a, c, g or t
  modified_base (618852)..(618855): a, c, g or t
  modified_base (619407)..(619407): a, c, g or t
  modified_base (620050)..(620050): a, c, g or t
  modified_base (620802)..(620803): a, c, g or t
  modified_base (622970)..(622974): a, c, g or t
  modified_base (624391)..(624391): a, c, g or t
  modified_base (625206)..(625209): a, c, g or t
  modified_base (625243)..(625246): a, c, g or t
  modified_base (625624)..(625627): a, c, g or t
  modified_base (627569)..(627569): a, c, g or t
  modified_base (628728)..(628728): a, c, g or t
  modified_base (628893)..(628893): a, c, g or t
  modified_base (628904)..(628904): a, c, g or t
  modified_base (630430)..(630433): a, c, g or t
  modified_base (630641)..(630641): a, c, g or t
  modified_base (632319)..(632319): a, c, g or t
  modified_base (632635)..(632635): a, c, g or t
  modified_base (634307)..(634307): a, c, g or t
  modified_base (634905)..(634905): a, c, g or t
  modified_base (634993)..(634993): a, c, g or t
  modified_base (636256)..(636259): a, c, g or t
  modified_base (636263)..(636264): a, c, g or t
  modified_base (636570)..(636580): a, c, g or t
  modified_base (637768)..(637768): a, c, g or t
  modified_base (637770)..(637777): a, c, g or t
  modified_base (638422)..(638425): a, c, g or t
  modified_base (639556)..(639569): a, c, g or t
  modified_base (641807)..(641807): a, c, g or t
  modified_base (641810)..(641811): a, c, g or t
  modified_base (644698)..(644698): a, c, g or t
  modified_base (648241)..(648241): a, c, g or t
  modified_base (648323)..(648323): a, c, g or t
  modified_base (648358)..(648358): a, c, g or t
  modified_base (649192)..(649192): a, c, g or t
  modified_base (649276)..(649276): a, c, g or t
  modified_base (650148)..(650151): a, c, g or t
  modified_base (650810)..(650813): a, c, g or t
  modified_base (650815)..(650816): a, c, g or t
  modified_base (651982)..(651995): a, c, g or t
  modified_base (652939)..(652939): a, c, g or t
  modified_base (653523)..(653538): a, c, g or t
  modified_base (654889)..(654889): a, c, g or t
  modified_base (654895)..(654898): a, c, g or t
  modified_base (655053)..(655054): a, c, g or t
  modified_base (655058)..(655066): a, c, g or t
  modified_base (655293)..(655297): a, c, g or t
  modified_base (655963)..(655963): a, c, g or t
  modified_base (656001)..(656012): a, c, g or t
  modified_base (656274)..(656277): a, c, g or t
  modified_base (657455)..(657458): a, c, g or t
  modified_base (657644)..(657646): a, c, g or t
  modified_base (657672)..(657673): a, c, g or t
  modified_base (658009)..(658009): a, c, g or t
  modified_base (658954)..(658955): a, c, g or t
  modified_base (661722)..(661722): a, c, g or t
  modified_base (662186)..(662188): a, c, g or t
  modified_base (662382)..(662382): a, c, g or t
  modified_base (664782)..(664782): a, c, g or t
  modified_base (664787)..(664798): a, c, g or t
  modified_base (665007)..(665007): a, c, g or t
  modified_base (665605)..(665605): a, c, g or t
  modified_base (665609)..(665610): a, c, g or t
  modified_base (665613)..(665618): a, c, g or t
  modified_base (666834)..(666835): a, c, g or t
  modified_base (667553)..(667554): a, c, g or t
  modified_base (668391)..(668394): a, c, g or t
  modified_base (669377)..(669378): a, c, g or t
  modified_base (669393)..(669394): a, c, g or t
  modified_base (669397)..(669397): a, c, g or t
  modified_base (669406)..(669406): a, c, g or t
  modified_base (669408)..(669446): a, c, g or t
  modified_base (670969)..(670969): a, c, g or t
  modified_base (671334)..(671338): a, c, g or t
  modified_base (672185)..(672185): a, c, g or t
  modified_base (673146)..(673150): a, c, g or t
  modified_base (676592)..(676592): a, c, g or t
  modified_base (678104)..(678104): a, c, g or t
  modified_base (685061)..(685061): a, c, g or t
  modified_base (687870)..(687870): a, c, g or t
  modified_base (688026)..(688026): a, c, g or t
  modified_base (688992)..(688992): a, c, g or t
  modified_base (689540)..(689541): a, c, g or t
  modified_base (692530)..(692530): a, c, g or t
  modified_base (692916)..(692916): a, c, g or t
  modified_base (693132)..(693132): a, c, g or t
  modified_base (695933)..(695933): a, c, g or t
  modified_base (696026)..(696031): a, c, g or t
  modified_base (696868)..(696870): a, c, g or t
  modified_base (698237)..(698237): a, c, g or t
  modified_base (698861)..(698862): a, c, g or t
  modified_base (698865)..(698865): a, c, g or t
  modified_base (698868)..(698869): a, c, g or t
  modified_base (703581)..(703581): a, c, g or t
  modified_base (703633)..(703633): a, c, g or t
  modified_base (703641)..(703641): a, c, g or t
  modified_base (704656)..(704656): a, c, g or t
  modified_base (704988)..(704988): a, c, g or t
  modified_base (706436)..(706436): a, c, g or t
  modified_base (706919)..(706919): a, c, g or t
  modified_base (707074)..(707074): a, c, g or t
  modified_base (707216)..(707216): a, c, g or t
  modified_base (707664)..(707664): a, c, g or t
  modified_base (712776)..(712776): a, c, g or t
  modified_base (714460)..(714464): a, c, g or t
  modified_base (714466)..(714469): a, c, g or t
  modified_base (716160)..(716160): a, c, g or t
  modified_base (716331)..(716331): a, c, g or t
  modified_base (717687)..(717687): a, c, g or t
  modified_base (720996)..(720996): a, c, g or t
  modified_base (721561)..(721565): a, c, g or t
  modified_base (724948)..(724948): a, c, g or t
  modified_base (725529)..(725529): a, c, g or t
  modified_base (727886)..(727886): a, c, g or t
  modified_base (729811)..(729811): a, c, g or t
  modified_base (729953)..(729953): a, c, g or t
  modified_base (732245)..(732248): a, c, g or t
  modified_base (733889)..(733889): a, c, g or t
  modified_base (734891)..(734891): a, c, g or t
  modified_base (734893)..(734897): a, c, g or t
  modified_base (736497)..(736500): a, c, g or t
  modified_base (737741)..(737741): a, c, g or t
  modified_base (738483)..(738483): a, c, g or t
  modified_base (738493)..(738493): a, c, g or t
  modified_base (738645)..(738645): a, c, g or t
  modified_base (738649)..(738649): a, c, g or t
  modified_base (739403)..(739403): a, c, g or t
  modified_base (739679)..(739679): a, c, g or t
  modified_base (739781)..(739781): a, c, g or t
  modified_base (741596)..(741613): a, c, g or t
  modified_base (744800)..(744800): a, c, g or t
  modified_base (747734)..(747734): a, c, g or t
  modified_base (748099)..(748099): a, c, g or t
  modified_base (748556)..(748556): a, c, g or t
  modified_base (748786)..(748790): a, c, g or t
  modified_base (749604)..(749604): a, c, g or t
  modified_base (750083)..(750083): a, c, g or t
  modified_base (753691)..(753691): a, c, g or t
  modified_base (754752)..(754753): a, c, g or t
  modified_base (756485)..(756485): a, c, g or t
  modified_base (756509)..(756509): a, c, g or t
  modified_base (758574)..(758574): a, c, g or t
  modified_base (759574)..(759574): a, c, g or t
  modified_base (759635)..(759635): a, c, g or t
  modified_base (759745)..(759745): a, c, g or t
  modified_base (762972)..(762972): a, c, g or t
  modified_base (765086)..(765086): a, c, g or t
  modified_base (765946)..(765946): a, c, g or t
  modified_base (766395)..(766395): a, c, g or t
  modified_base (766496)..(766496): a, c, g or t
  modified_base (768974)..(768977): a, c, g or t
  modified_base (772823)..(772823): a, c, g or t
  modified_base (774934)..(774934): a, c, g or t
  modified_base (775088)..(775088): a, c, g or t
  modified_base (775370)..(775370): a, c, g or t
  modified_base (775413)..(775417): a, c, g or t
  modified_base (775421)..(775421): a, c, g or t
  modified_base (775450)..(775456): a, c, g or t
  modified_base (775565)..(775566): a, c, g or t
  modified_base (776410)..(776410): a, c, g or t
  modified_base (778006)..(778006): a, c, g or t
  modified_base (778357)..(778360): a, c, g or t
  modified_base (781879)..(781879): a, c, g or t
  modified_base (782104)..(782104): a, c, g or t
  modified_base (782655)..(782655): a, c, g or t
  modified_base (783775)..(783775): a, c, g or t
  modified_base (783964)..(783964): a, c, g or t
  modified_base (784224)..(784224): a, c, g or t
  modified_base (786859)..(786867): a, c, g or t
  modified_base (789515)..(789518): a, c, g or t
  modified_base (789986)..(789989): a, c, g or t
  modified_base (792286)..(792291): a, c, g or t
  modified_base (793619)..(793619): a, c, g or t
  modified_base (796438)..(796438): a, c, g or t
  modified_base (796795)..(796795): a, c, g or t
  modified_base (797231)..(797234): a, c, g or t
  modified_base (798647)..(798650): a, c, g or t
  modified_base (798933)..(798933): a, c, g or t
  modified_base (800264)..(800264): a, c, g or t
  modified_base (803326)..(803329): a, c, g or t
  modified_base (805000)..(805000): a, c, g or t
  modified_base (805165)..(805165): a, c, g or t
  modified_base (806646)..(806647): a, c, g or t
  modified_base (806925)..(806926): a, c, g or t
  modified_base (807398)..(807398): a, c, g or t
  modified_base (808012)..(808012): a, c, g or t
  modified_base (808457)..(808457): a, c, g or t
  modified_base (808743)..(808743): a, c, g or t
  modified_base (809143)..(809143): a, c, g or t
  modified_base (809317)..(809318): a, c, g or t
  modified_base (809324)..(809325): a, c, g or t
  modified_base (810065)..(810066): a, c, g or t
  modified_base (810263)..(810269): a, c, g or t
  modified_base (812205)..(812205): a, c, g or t
  modified_base (812207)..(812211): a, c, g or t
  modified_base (812626)..(812626): a, c, g or t
  modified_base (815916)..(815916): a, c, g or t
  modified_base (816475)..(816485): a, c, g or t
  modified_base (816783)..(816783): a, c, g or t
  modified_base (816905)..(816905): a, c, g or t
  modified_base (817309)..(817309): a, c, g or t
  modified_base (818866)..(818866): a, c, g or t
  modified_base (819806)..(819806): a, c, g or t
  modified_base (821727)..(821727): a, c, g or t
  modified_base (824406)..(824412): a, c, g or t
  modified_base (825699)..(825699): a, c, g or t
  modified_base (828358)..(828358): a, c, g or t
  modified_base (828360)..(828363): a, c, g or t
  modified_base (828589)..(828589): a, c, g or t
  modified_base (828620)..(828624): a, c, g or t
  modified_base (829872)..(829872): a, c, g or t
  modified_base (832150)..(832155): a, c, g or t
  modified_base (834164)..(834164): a, c, g or t
  modified_base (834471)..(834471): a, c, g or t
  modified_base (834488)..(834488): a, c, g or t
  modified_base (834768)..(834769): a, c, g or t
  modified_base (835920)..(835930): a, c, g or t
  modified_base (836912)..(836912): a, c, g or t
  modified_base (837829)..(837830): a, c, g or t
  modified_base (837832)..(837834): a, c, g or t
  modified_base (841466)..(841468): a, c, g or t
  modified_base (841471)..(841472): a, c, g or t
  modified_base (842227)..(842227): a, c, g or t
  modified_base (842483)..(842483): a, c, g or t
  modified_base (843022)..(843023): a, c, g or t
  modified_base (843025)..(843040): a, c, g or t
  modified_base (843501)..(843501): a, c, g or t
  modified_base (843650)..(843653): a, c, g or t
  modified_base (843657)..(843657): a, c, g or t
  modified_base (846672)..(846675): a, c, g or t
  modified_base (850455)..(850458): a, c, g or t
  modified_base (850856)..(850856): a, c, g or t
  modified_base (851412)..(851421): a, c, g or t
  modified_base (852163)..(852166): a, c, g or t
  modified_base (853229)..(853232): a, c, g or t
  modified_base (861080)..(861080): a, c, g or t
  modified_base (863145)..(863145): a, c, g or t
  modified_base (863808)..(863811): a, c, g or t
  modified_base (863975)..(863976): a, c, g or t
  modified_base (863979)..(864005): a, c, g or t
  modified_base (864110)..(864121): a, c, g or t
  modified_base (864124)..(864124): a, c, g or t
  modified_base (864190)..(864212): a, c, g or t
  modified_base (868882)..(868882): a, c, g or t
  modified_base (868885)..(868885): a, c, g or t
  modified_base (869349)..(869349): a, c, g or t
  modified_base (871041)..(871041): a, c, g or t
  modified_base (872598)..(872598): a, c, g or t
  modified_base (872619)..(872619): a, c, g or t
  modified_base (872849)..(872849): a, c, g or t
  modified_base (873366)..(873368): a, c, g or t
  modified_base (873567)..(873568): a, c, g or t
  modified_base (873571)..(873574): a, c, g or t
  modified_base (873753)..(873753): a, c, g or t
  modified_base (874317)..(874323): a, c, g or t
  modified_base (874327)..(874327): a, c, g or t
  modified_base (874334)..(874335): a, c, g or t
  modified_base (874893)..(874893): a, c, g or t
  modified_base (877050)..(877050): a, c, g or t
  modified_base (881463)..(881463): a, c, g or t
  modified_base (884510)..(884515): a, c, g or t
  modified_base (885137)..(885137): a, c, g or t
  modified_base (886228)..(886231): a, c, g or t
  modified_base (886444)..(886451): a, c, g or t
  modified_base (888634)..(888634): a, c, g or t
  modified_base (889772)..(889772): a, c, g or t
  modified_base (890749)..(890752): a, c, g or t
  modified_base (890981)..(890981): a, c, g or t
  modified_base (891705)..(891706): a, c, g or t
  modified_base (891734)..(891740): a, c, g or t
  modified_base (891742)..(891743): a, c, g or t
  modified_base (891797)..(891797): a, c, g or t
  modified_base (892712)..(892712): a, c, g or t
  modified_base (894384)..(894384): a, c, g or t
  modified_base (894386)..(894397): a, c, g or t
  modified_base (894604)..(894604): a, c, g or t
  modified_base (894700)..(894701): a, c, g or t
  modified_base (894798)..(894799): a, c, g or t
  modified_base (894802)..(894807): a, c, g or t
  modified_base (895829)..(895830): a, c, g or t
  modified_base (895851)..(895854): a, c, g or t
  modified_base (895924)..(895927): a, c, g or t
  modified_base (895946)..(895950): a, c, g or t
  modified_base (896038)..(896038): a, c, g or t
  modified_base (896655)..(896659): a, c, g or t
  modified_base (896683)..(896689): a, c, g or t
  modified_base (896692)..(896692): a, c, g or t
  modified_base (897752)..(897755): a, c, g or t
  modified_base (897826)..(897837): a, c, g or t
  modified_base (897897)..(897897): a, c, g or t
  modified_base (898829)..(898832): a, c, g or t
  modified_base (900978)..(900978): a, c, g or t
  modified_base (901496)..(901496): a, c, g or t
  modified_base (901769)..(901769): a, c, g or t
  modified_base (902140)..(902140): a, c, g or t
  modified_base (902233)..(902233): a, c, g or t
  modified_base (907744)..(907744): a, c, g or t
  modified_base (907780)..(907780): a, c, g or t
  modified_base (909640)..(909640): a, c, g or t
  modified_base (915001)..(915001): a, c, g or t
  modified_base (915169)..(915169): a, c, g or t
  modified_base (915482)..(915482): a, c, g or t
  modified_base (915516)..(915516): a, c, g or t
  modified_base (915534)..(915534): a, c, g or t
  modified_base (915549)..(915549): a, c, g or t
  modified_base (915551)..(915551): a, c, g or t
  modified_base (915582)..(915582): a, c, g or t
  modified_base (915595)..(915595): a, c, g or t
  modified_base (915710)..(915710): a, c, g or t
  modified_base (915867)..(915867): a, c, g or t
  modified_base (915873)..(915873): a, c, g or t
  modified_base (915900)..(915900): a, c, g or t
  modified_base (915933)..(915933): a, c, g or t
  modified_base (915972)..(915972): a, c, g or t
  modified_base (915999)..(915999): a, c, g or t
  modified_base (916139)..(916139): a, c, g or t
  modified_base (916146)..(916146): a, c, g or t
  modified_base (916178)..(916178): a, c, g or t
  modified_base (916273)..(916273): a, c, g or t
  modified_base (916310)..(916314): a, c, g or t
  modified_base (916442)..(916442): a, c, g or t
  modified_base (916559)..(916559): a, c, g or t
  modified_base (916718)..(916718): a, c, g or t
  modified_base (917004)..(917008): a, c, g or t
  modified_base (917270)..(917270): a, c, g or t
  modified_base (917328)..(917328): a, c, g or t
  modified_base (917364)..(917364): a, c, g or t
  modified_base (917433)..(917433): a, c, g or t
  modified_base (917477)..(917477): a, c, g or t
  modified_base (917881)..(917881): a, c, g or t
  modified_base (918103)..(918116): a, c, g or t
  modified_base (918131)..(918131): a, c, g or t
  modified_base (918325)..(918325): a, c, g or t
  modified_base (918370)..(918370): a, c, g or t
  modified_base (918468)..(918468): a, c, g or t
  modified_base (918639)..(918639): a, c, g or t
  modified_base (918714)..(918714): a, c, g or t
  modified_base (918894)..(918894): a, c, g or t
  modified_base (919608)..(919608): a, c, g or t
  modified_base (919686)..(919686): a, c, g or t
  modified_base (919842)..(919842): a, c, g or t
  modified_base (919893)..(919893): a, c, g or t
  modified_base (919926)..(919926): a, c, g or t
  modified_base (919935)..(919935): a, c, g or t
  modified_base (919954)..(919954): a, c, g or t
  modified_base (919968)..(919968): a, c, g or t
  modified_base (920001)..(920001): a, c, g or t
  modified_base (920157)..(920157): a, c, g or t
  modified_base (920256)..(920256): a, c, g or t
  modified_base (920418)..(920418): a, c, g or t
  modified_base (920466)..(920466): a, c, g or t
  modified_base (920508)..(920508): a, c, g or t
  modified_base (920544)..(920544): a, c, g or t
  modified_base (920639)..(920639): a, c, g or t
  modified_base (920676)..(920676): a, c, g or t
  modified_base (920691)..(920691): a, c, g or t
  modified_base (920757)..(920757): a, c, g or t
  modified_base (920883)..(920883): a, c, g or t
  modified_base (920901)..(920901): a, c, g or t
  modified_base (920938)..(920957): a, c, g or t
  modified_base (920968)..(920968): a, c, g or t
  modified_base (920998)..(920998): a, c, g or t
  modified_base (921025)..(921025): a, c, g or t
  modified_base (921036)..(921036): a, c, g or t
  modified_base (921055)..(921055): a, c, g or t
  modified_base (921076)..(921076): a, c, g or t
  modified_base (921079)..(921079): a, c, g or t
  modified_base (921231)..(921231): a, c, g or t
  modified_base (921244)..(921244): a, c, g or t
  modified_base (921249)..(921249): a, c, g or t
  modified_base (921280)..(921280): a, c, g or t
  modified_base (921295)..(921295): a, c, g or t
  modified_base (921313)..(921313): a, c, g or t
  modified_base (921332)..(921332): a, c, g or t
  modified_base (921358)..(921358): a, c, g or t
  modified_base (921370)..(921374): a, c, g or t
  modified_base (921409)..(921409): a, c, g or t
  modified_base (921460)..(921460): a, c, g or t
  modified_base (921515)..(921515): a, c, g or t
  modified_base (921529)..(921529): a, c, g or t
  modified_base (921569)..(921572): a, c, g or t
  modified_base (921574)..(921574): a, c, g or t
  modified_base (921590)..(921590): a, c, g or t
  modified_base (921630)..(921630): a, c, g or t
  modified_base (921734)..(921734): a, c, g or t
  modified_base (921759)..(921759): a, c, g or t
  modified_base (921777)..(921777): a, c, g or t
  modified_base (921798)..(921798): a, c, g or t
  modified_base (921804)..(921804): a, c, g or t
  modified_base (921846)..(921846): a, c, g or t
  modified_base (921865)..(921865): a, c, g or t
  modified_base (921888)..(921888): a, c, g or t
  modified_base (921945)..(921945): a, c, g or t
  modified_base (921951)..(921951): a, c, g or t
  modified_base (922020)..(922020): a, c, g or t
  modified_base (922029)..(922029): a, c, g or t
  modified_base (922074)..(922074): a, c, g or t
  modified_base (922101)..(922101): a, c, g or t
  modified_base (922143)..(922143): a, c, g or t
  modified_base (922150)..(922150): a, c, g or t
  modified_base (922161)..(922161): a, c, g or t
  modified_base (922211)..(922211): a, c, g or t
  modified_base (922478)..(922482): a, c, g or t
  modified_base (922855)..(922855): a, c, g or t
  modified_base (922878)..(922878): a, c, g or t
  modified_base (922893)..(922893): a, c, g or t
  modified_base (922911)..(922911): a, c, g or t
  modified_base (922944)..(922944): a, c, g or t
  modified_base (923053)..(923053): a, c, g or t
  modified_base (923065)..(923065): a, c, g or t
  modified_base (923086)..(923086): a, c, g or t
  modified_base (923103)..(923103): a, c, g or t
  modified_base (923116)..(923116): a, c, g or t
  modified_base (923399)..(923399): a, c, g or t
  modified_base (923865)..(923865): a, c, g or t
  modified_base (923959)..(923959): a, c, g or t
  modified_base (924475)..(924478): a, c, g or t
  modified_base (925758)..(925758): a, c, g or t
  modified_base (925813)..(925822): a, c, g or t
  modified_base (925883)..(925884): a, c, g or t
  modified_base (927996)..(927996): a, c, g or t
  modified_base (928525)..(928525): a, c, g or t
  modified_base (929150)..(929152): a, c, g or t
  modified_base (929259)..(929259): a, c, g or t
  modified_base (929381)..(929381): a, c, g or t
  modified_base (930866)..(930866): a, c, g or t
  modified_base (932591)..(932591): a, c, g or t
  modified_base (933298)..(933298): a, c, g or t
  modified_base (933398)..(933398): a, c, g or t
  modified_base (934127)..(934131): a, c, g or t
  modified_base (934882)..(934882): a, c, g or t
  modified_base (935711)..(935711): a, c, g or t
  modified_base (936816)..(936816): a, c, g or t
  modified_base (937188)..(937188): a, c, g or t
  modified_base (937828)..(937828): a, c, g or t
  modified_base (937831)..(937837): a, c, g or t
  modified_base (938075)..(938075): a, c, g or t
  modified_base (939309)..(939309): a, c, g or t
  modified_base (939576)..(939576): a, c, g or t
  modified_base (939789)..(939790): a, c, g or t
  modified_base (941899)..(941915): a, c, g or t
  modified_base (942548)..(942548): a, c, g or t
  modified_base (942867)..(942867): a, c, g or t
  modified_base (945049)..(945049): a, c, g or t
  modified_base (946500)..(946500): a, c, g or t
  modified_base (947875)..(947875): a, c, g or t
  modified_base (949557)..(949557): a, c, g or t
  modified_base (950797)..(950797): a, c, g or t
  modified_base (951058)..(951058): a, c, g or t
  modified_base (954776)..(954776): a, c, g or t
  modified_base (955727)..(955727): a, c, g or t
  modified_base (956314)..(956314): a, c, g or t
  modified_base (956697)..(956700): a, c, g or t
  modified_base (957261)..(957261): a, c, g or t
  modified_base (958518)..(958522): a, c, g or t
  modified_base (959483)..(959486): a, c, g or t
  modified_base (960426)..(960431): a, c, g or t
  modified_base (960450)..(960450): a, c, g or t
  modified_base (960728)..(960731): a, c, g or t
  modified_base (960975)..(960978): a, c, g or t
  modified_base (961938)..(961938): a, c, g or t
  modified_base (962224)..(962227): a, c, g or t
  modified_base (963321)..(963321): a, c, g or t
  modified_base (965180)..(965181): a, c, g or t
  modified_base (965403)..(965403): a, c, g or t
  modified_base (966555)..(966555): a, c, g or t
  modified_base (969219)..(969219): a, c, g or t
  modified_base (969470)..(969470): a, c, g or t
  modified_base (970344)..(970349): a, c, g or t
  modified_base (973378)..(973378): a, c, g or t
  modified_base (974137)..(974137): a, c, g or t
  modified_base (975586)..(975586): a, c, g or t
  modified_base (976157)..(976157): a, c, g or t
  modified_base (977112)..(977112): a, c, g or t
  modified_base (978930)..(978930): a, c, g or t
  modified_base (978939)..(978939): a, c, g or t
  modified_base (979913)..(979914): a, c, g or t
  modified_base (982178)..(982181): a, c, g or t
  modified_base (983609)..(983612): a, c, g or t
  modified_base (986099)..(986099): a, c, g or t
  modified_base (986904)..(986904): a, c, g or t
  modified_base (987285)..(987285): a, c, g or t
  modified_base (988488)..(988489): a, c, g or t
  modified_base (988491)..(988499): a, c, g or t
  modified_base (988503)..(988503): a, c, g or t
  modified_base (989005)..(989005): a, c, g or t
  modified_base (991164)..(991164): a, c, g or t
  modified_base (995958)..(995958): a, c, g or t
  modified_base (996009)..(996009): a, c, g or t
  modified_base (996437)..(996440): a, c, g or t
  modified_base (999302)..(999302): a, c, g or t
  modified_base (1003420)..(1003429): a, c, g or t
  modified_base (1003739)..(1003739): a, c, g or t
  modified_base (1006777)..(1006777): a, c, g or t
  modified_base (1009336)..(1009342): a, c, g or t
  modified_base (1010551)..(1010556): a, c, g or t
  modified_base (1010823)..(1010823): a, c, g or t
  modified_base (1012017)..(1012017): a, c, g or t
  modified_base (1016473)..(1016473): a, c, g or t
  modified_base (1016539)..(1016539): a, c, g or t
  modified_base (1016737)..(1016737): a, c, g or t
  modified_base (1016968)..(1016968): a, c, g or t
  modified_base (1017076)..(1017076): a, c, g or t
  modified_base (1017122)..(1017122): a, c, g or t
  modified_base (1017124)..(1017124): a, c, g or t
  modified_base (1017130)..(1017130): a, c, g or t
  modified_base (1022144)..(1022147): a, c, g or t
  modified_base (1025444)..(1025444): a, c, g or t
  modified_base (1026003)..(1026008): a, c, g or t
  modified_base (1031209)..(1031209): a, c, g or t
  modified_base (1031345)..(1031345): a, c, g or t
  modified_base (1031446)..(1031446): a, c, g or t
  modified_base (1032177)..(1032178): a, c, g or t
  modified_base (1032451)..(1032459): a, c, g or t
  modified_base (1033020)..(1033021): a, c, g or t
  modified_base (1033070)..(1033074): a, c, g or t
  modified_base (1033581)..(1033586): a, c, g or t
  modified_base (1034691)..(1034691): a, c, g or t
  modified_base (1035565)..(1035565): a, c, g or t
  modified_base (1036266)..(1036266): a, c, g or t
  modified_base (1036577)..(1036577): a, c, g or t
  modified_base (1037803)..(1037806): a, c, g or t
  modified_base (1038992)..(1038992): a, c, g or t
  modified_base (1040300)..(1040300): a, c, g or t
  modified_base (1040814)..(1040814): a, c, g or t
  modified_base (1044952)..(1044953): a, c, g or t
  modified_base (1044960)..(1044961): a, c, g or t
  modified_base (1047829)..(1047829): a, c, g or t
  modified_base (1050452)..(1050455): a, c, g or t
  modified_base (1053904)..(1053909): a, c, g or t
  modified_base (1053911)..(1053911): a, c, g or t
  modified_base (1055611)..(1055611): a, c, g or t
  modified_base (1056878)..(1056878): a, c, g or t
  modified_base (1060098)..(1060103): a, c, g or t
  modified_base (1060445)..(1060445): a, c, g or t
  modified_base (1062288)..(1062288): a, c, g or t
  modified_base (1063809)..(1063809): a, c, g or t
  modified_base (1064535)..(1064535): a, c, g or t
  modified_base (1066852)..(1066852): a, c, g or t
  modified_base (1067949)..(1067949): a, c, g or t
  modified_base (1068510)..(1068510): a, c, g or t
  modified_base (1068584)..(1068584): a, c, g or t
  modified_base (1068939)..(1068939): a, c, g or t
  modified_base (1069378)..(1069378): a, c, g or t
  modified_base (1071920)..(1071920): a, c, g or t
  modified_base (1075063)..(1075063): a, c, g or t
  modified_base (1080091)..(1080091): a, c, g or t
  modified_base (1080093)..(1080096): a, c, g or t
  modified_base (1083035)..(1083084): a, c, g or t
  modified_base (1084929)..(1084929): a, c, g or t
  modified_base (1085653)..(1085653): a, c, g or t
  modified_base (1086353)..(1086357): a, c, g or t
  modified_base (1089525)..(1089525): a, c, g or t
  modified_base (1090976)..(1090976): a, c, g or t
  modified_base (1093558)..(1093558): a, c, g or t
  modified_base (1097544)..(1097547): a, c, g or t
  modified_base (1102472)..(1102472): a, c, g or t
  modified_base (1103016)..(1103016): a, c, g or t
  modified_base (1103200)..(1103200): a, c, g or t
  modified_base (1103543)..(1103543): a, c, g or t
  modified_base (1105460)..(1105460): a, c, g or t
  modified_base (1105999)..(1106000): a, c, g or t
  modified_base (1106004)..(1106004): a, c, g or t
  modified_base (1107794)..(1107794): a, c, g or t
  modified_base (1110654)..(1110654): a, c, g or t
  modified_base (1111576)..(1111576): a, c, g or t
  modified_base (1114665)..(1114665): a, c, g or t
  modified_base (1117446)..(1117446): a, c, g or t
  modified_base (1120075)..(1120075): a, c, g or t
  modified_base (1121170)..(1121170): a, c, g or t
  modified_base (1122383)..(1122383): a, c, g or t
  modified_base (1123377)..(1123377): a, c, g or t
  modified_base (1123396)..(1123396): a, c, g or t
  modified_base (1124474)..(1124474): a, c, g or t
  modified_base (1124561)..(1124561): a, c, g or t
  modified_base (1124714)..(1124714): a, c, g or t
  modified_base (1125765)..(1125765): a, c, g or t
  modified_base (1125940)..(1125941): a, c, g or t
  modified_base (1126001)..(1126013): a, c, g or t
  modified_base (1126016)..(1126016): a, c, g or t
  modified_base (1127069)..(1127069): a, c, g or t
  modified_base (1127072)..(1127072): a, c, g or t
  modified_base (1131327)..(1131327): a, c, g or t
  modified_base (1132190)..(1132190): a, c, g or t
  modified_base (1133092)..(1133092): a, c, g or t
  modified_base (1134903)..(1134906): a, c, g or t
  modified_base (1137457)..(1137457): a, c, g or t
  modified_base (1138730)..(1138730): a, c, g or t
  modified_base (1139343)..(1139343): a, c, g or t
  modified_base (1139406)..(1139406): a, c, g or t
  modified_base (1144183)..(1144187): a, c, g or t
  modified_base (1144189)..(1144189): a, c, g or t
  modified_base (1148610)..(1148610): a, c, g or t
  modified_base (1148732)..(1148732): a, c, g or t
  modified_base (1150787)..(1150787): a, c, g or t
  modified_base (1151076)..(1151076): a, c, g or t
  modified_base (1155711)..(1155711): a, c, g or t
  modified_base (1156372)..(1156380): a, c, g or t
  modified_base (1156383)..(1156386): a, c, g or t
  modified_base (1156633)..(1156633): a, c, g or t
  modified_base (1159489)..(1159489): a, c, g or t
  modified_base (1163078)..(1163078): a, c, g or t
  modified_base (1165021)..(1165021): a, c, g or t
  modified_base (1173496)..(1173496): a, c, g or t
  modified_base (1174240)..(1174240): a, c, g or t
  modified_base (1175553)..(1175553): a, c, g or t
  modified_base (1178760)..(1178761): a, c, g or t
  modified_base (1178763)..(1178774): a, c, g or t
  modified_base (1179177)..(1179177): a, c, g or t
  modified_base (1179189)..(1179189): a, c, g or t
  modified_base (1179246)..(1179246): a, c, g or t
  modified_base (1180763)..(1180763): a, c, g or t
  modified_base (1182048)..(1182051): a, c, g or t
  modified_base (1186774)..(1186774): a, c, g or t
  modified_base (1186912)..(1186912): a, c, g or t
  modified_base (1187369)..(1187369): a, c, g or t
  modified_base (1187450)..(1187450): a, c, g or t
  modified_base (1189068)..(1189068): a, c, g or t
  modified_base (1189081)..(1189081): a, c, g or t
  modified_base (1190239)..(1190239): a, c, g or t
  modified_base (1190253)..(1190253): a, c, g or t
  modified_base (1191509)..(1191509): a, c, g or t
  modified_base (1191578)..(1191580): a, c, g or t
  modified_base (1191649)..(1191649): a, c, g or t
  modified_base (1191869)..(1191869): a, c, g or t
  modified_base (1192426)..(1192427): a, c, g or t
  modified_base (1192777)..(1192777): a, c, g or t
  modified_base (1193249)..(1193249): a, c, g or t
  modified_base (1194491)..(1194491): a, c, g or t
  modified_base (1194740)..(1194744): a, c, g or t
  modified_base (1194919)..(1194919): a, c, g or t
  modified_base (1195015)..(1195015): a, c, g or t
  modified_base (1195355)..(1195364): a, c, g or t
  modified_base (1195822)..(1195823): a, c, g or t
  modified_base (1196885)..(1196885): a, c, g or t
  modified_base (1197187)..(1197187): a, c, g or t
  modified_base (1197593)..(1197599): a, c, g or t
  modified_base (1198717)..(1198720): a, c, g or t
  modified_base (1198722)..(1198725): a, c, g or t
  modified_base (1200623)..(1200624): a, c, g or t
  modified_base (1201300)..(1201300): a, c, g or t
  modified_base (1201514)..(1201514): a, c, g or t
  modified_base (1201943)..(1201943): a, c, g or t
  modified_base (1204880)..(1204883): a, c, g or t
  modified_base (1205697)..(1205697): a, c, g or t
  modified_base (1209601)..(1209603): a, c, g or t
  modified_base (1212677)..(1212688): a, c, g or t
  modified_base (1214777)..(1214777): a, c, g or t
  modified_base (1217715)..(1217715): a, c, g or t
  modified_base (1217717)..(1217718): a, c, g or t
  modified_base (1220813)..(1220813): a, c, g or t
  modified_base (1221486)..(1221486): a, c, g or t
  modified_base (1221498)..(1221498): a, c, g or t
  modified_base (1222736)..(1222736): a, c, g or t
  modified_base (1223145)..(1223153): a, c, g or t
  modified_base (1223332)..(1223333): a, c, g or t
  modified_base (1225505)..(1225508): a, c, g or t
  modified_base (1225751)..(1225758): a, c, g or t
  modified_base (1225994)..(1225994): a, c, g or t
  modified_base (1226822)..(1226822): a, c, g or t
  modified_base (1227354)..(1227354): a, c, g or t
  modified_base (1230479)..(1230479): a, c, g or t
  modified_base (1232941)..(1232941): a, c, g or t
  modified_base (1234685)..(1234685): a, c, g or t
  modified_base (1235401)..(1235401): a, c, g or t
  modified_base (1235544)..(1235544): a, c, g or t
  modified_base (1235725)..(1235725): a, c, g or t
  modified_base (1235956)..(1235956): a, c, g or t
  modified_base (1239293)..(1239293): a, c, g or t
  modified_base (1240389)..(1240392): a, c, g or t
  modified_base (1241637)..(1241641): a, c, g or t
  modified_base (1244943)..(1244943): a, c, g or t
  modified_base (1244946)..(1244946): a, c, g or t
  modified_base (1245437)..(1245440): a, c, g or t
  modified_base (1248174)..(1248174): a, c, g or t
  modified_base (1248927)..(1248933): a, c, g or t
  modified_base (1249024)..(1249024): a, c, g or t
  modified_base (1251434)..(1251440): a, c, g or t
  modified_base (1252691)..(1252700): a, c, g or t
  modified_base (1252710)..(1252710): a, c, g or t
  modified_base (1253386)..(1253386): a, c, g or t
  modified_base (1253699)..(1253706): a, c, g or t
  modified_base (1253766)..(1253767): a, c, g or t
  modified_base (1254559)..(1254559): a, c, g or t
  modified_base (1256167)..(1256170): a, c, g or t
  modified_base (1257047)..(1257086): a, c, g or t
  modified_base (1259262)..(1259262): a, c, g or t
  modified_base (1259568)..(1259568): a, c, g or t
  modified_base (1260189)..(1260189): a, c, g or t
  modified_base (1261350)..(1261368): a, c, g or t
  modified_base (1262871)..(1262877): a, c, g or t
  modified_base (1262880)..(1262881): a, c, g or t
  modified_base (1263806)..(1263809): a, c, g or t
  modified_base (1266620)..(1266620): a, c, g or t
  modified_base (1267311)..(1267311): a, c, g or t
  modified_base (1268258)..(1268258): a, c, g or t
  modified_base (1268464)..(1268464): a, c, g or t
  modified_base (1271576)..(1271576): a, c, g or t
  modified_base (1272316)..(1272316): a, c, g or t
  modified_base (1276048)..(1276048): a, c, g or t
  modified_base (1278490)..(1278491): a, c, g or t
  modified_base (1278494)..(1278498): a, c, g or t
  modified_base (1280404)..(1280404): a, c, g or t
  modified_base (1281488)..(1281488): a, c, g or t
  modified_base (1281490)..(1281493): a, c, g or t
  modified_base (1282046)..(1282046): a, c, g or t
  modified_base (1282058)..(1282058): a, c, g or t
  modified_base (1283691)..(1283691): a, c, g or t
  modified_base (1284212)..(1284212): a, c, g or t
  modified_base (1284767)..(1284770): a, c, g or t
  modified_base (1286487)..(1286487): a, c, g or t
  modified_base (1287096)..(1287102): a, c, g or t
  modified_base (1287635)..(1287635): a, c, g or t
  modified_base (1291436)..(1291436): a, c, g or t
  modified_base (1291839)..(1291839): a, c, g or t
  modified_base (1294397)..(1294397): a, c, g or t
  modified_base (1298599)..(1298599): a, c, g or t
  modified_base (1298754)..(1298754): a, c, g or t
  modified_base (1303271)..(1303271): a, c, g or t
  modified_base (1303275)..(1303277): a, c, g or t
  modified_base (1307233)..(1307233): a, c, g or t
  modified_base (1307741)..(1307741): a, c, g or t
  modified_base (1310577)..(1310577): a, c, g or t
  modified_base (1312263)..(1312263): a, c, g or t
  modified_base (1313349)..(1313349): a, c, g or t
  modified_base (1314821)..(1314821): a, c, g or t
  modified_base (1314872)..(1314882): a, c, g or t
  modified_base (1315434)..(1315438): a, c, g or t
  modified_base (1315645)..(1315645): a, c, g or t
  modified_base (1316814)..(1316814): a, c, g or t
  modified_base (1318118)..(1318118): a, c, g or t
  modified_base (1320185)..(1320187): a, c, g or t
  modified_base (1320189)..(1320194): a, c, g or t
  modified_base (1323825)..(1323825): a, c, g or t
  modified_base (1324648)..(1324648): a, c, g or t
  modified_base (1325200)..(1325203): a, c, g or t
  modified_base (1325371)..(1325371): a, c, g or t
  modified_base (1326909)..(1326909): a, c, g or t
  modified_base (1328263)..(1328270): a, c, g or t
  modified_base (1328277)..(1328278): a, c, g or t
  modified_base (1329817)..(1329817): a, c, g or t
  modified_base (1331232)..(1331232): a, c, g or t
  modified_base (1331439)..(1331439): a, c, g or t
  modified_base (1331620)..(1331621): a, c, g or t
  modified_base (1331624)..(1331628): a, c, g or t
  modified_base (1332791)..(1332795): a, c, g or t
  modified_base (1333054)..(1333054): a, c, g or t
  modified_base (1333299)..(1333299): a, c, g or t
  modified_base (1333418)..(1333418): a, c, g or t
  modified_base (1333919)..(1333919): a, c, g or t
  modified_base (1333973)..(1333973): a, c, g or t
  modified_base (1333999)..(1333999): a, c, g or t
  modified_base (1334011)..(1334012): a, c, g or t
  modified_base (1335064)..(1335065): a, c, g or t
  modified_base (1335582)..(1335582): a, c, g or t
  modified_base (1337840)..(1337840): a, c, g or t
  modified_base (1337846)..(1337847): a, c, g or t
  modified_base (1340412)..(1340412): a, c, g or t
  modified_base (1341097)..(1341097): a, c, g or t
  modified_base (1341563)..(1341569): a, c, g or t
  modified_base (1342551)..(1342558): a, c, g or t
  modified_base (1348479)..(1348479): a, c, g or t
  modified_base (1350257)..(1350258): a, c, g or t
  modified_base (1352169)..(1352170): a, c, g or t
  modified_base (1352259)..(1352262): a, c, g or t
  modified_base (1352267)..(1352271): a, c, g or t
  modified_base (1352317)..(1352320): a, c, g or t
  modified_base (1352324)..(1352387): a, c, g or t
  modified_base (1352423)..(1352465): a, c, g or t
  modified_base (1352656)..(1352656): a, c, g or t
  modified_base (1353430)..(1353433): a, c, g or t
  modified_base (1353435)..(1353435): a, c, g or t
  modified_base (1354508)..(1354509): a, c, g or t
  modified_base (1355307)..(1355307): a, c, g or t
  modified_base (1355697)..(1355699): a, c, g or t
  modified_base (1356949)..(1356951): a, c, g or t
  modified_base (1357170)..(1357181): a, c, g or t
  modified_base (1357350)..(1358587): a, c, g or t
  modified_base (1366839)..(1366839): a, c, g or t
  modified_base (1366888)..(1366954): a, c, g or t
  modified_base (1367332)..(1367333): a, c, g or t
  modified_base (1367339)..(1367340): a, c, g or t
  modified_base (1368232)..(1368232): a, c, g or t
  modified_base (1369858)..(1369858): a, c, g or t
  modified_base (1369867)..(1369872): a, c, g or t
  modified_base (1370929)..(1370929): a, c, g or t
  modified_base (1371105)..(1371105): a, c, g or t
  modified_base (1371108)..(1371115): a, c, g or t
  modified_base (1373576)..(1373576): a, c, g or t
  modified_base (1375527)..(1375530): a, c, g or t
  modified_base (1375582)..(1375582): a, c, g or t
  modified_base (1375587)..(1375596): a, c, g or t
  modified_base (1375601)..(1375601): a, c, g or t
  modified_base (1375717)..(1375720): a, c, g or t
  modified_base (1377373)..(1377373): a, c, g or t
  modified_base (1377385)..(1377385): a, c, g or t
  modified_base (1377427)..(1377427): a, c, g or t
  modified_base (1377484)..(1377484): a, c, g or t
  modified_base (1377628)..(1377628): a, c, g or t
  modified_base (1377652)..(1377652): a, c, g or t
  modified_base (1378226)..(1378229): a, c, g or t
  modified_base (1378272)..(1378272): a, c, g or t
  modified_base (1379300)..(1379303): a, c, g or t
  modified_base (1380794)..(1380794): a, c, g or t
  modified_base (1381050)..(1381050): a, c, g or t
  modified_base (1381132)..(1381132): a, c, g or t
  modified_base (1381170)..(1381170): a, c, g or t
  modified_base (1381532)..(1381536): a, c, g or t
  modified_base (1381584)..(1381584): a, c, g or t
  modified_base (1381586)..(1381586): a, c, g or t
  modified_base (1382512)..(1382554): a, c, g or t
  modified_base (1382657)..(1382696): a, c, g or t
  modified_base (1382843)..(1382898): a, c, g or t
  modified_base (1382932)..(1382971): a, c, g or t
  modified_base (1383336)..(1383336): a, c, g or t
  modified_base (1383462)..(1383462): a, c, g or t
  modified_base (1383464)..(1383465): a, c, g or t
  modified_base (1383470)..(1383470): a, c, g or t
  modified_base (1383549)..(1383559): a, c, g or t
  modified_base (1383623)..(1383628): a, c, g or t
  modified_base (1383659)..(1383659): a, c, g or t
  modified_base (1383667)..(1383681): a, c, g or t
  modified_base (1383758)..(1383766): a, c, g or t
  modified_base (1383971)..(1383971): a, c, g or t
  modified_base (1384102)..(1384102): a, c, g or t
  modified_base (1384312)..(1384312): a, c, g or t
  modified_base (1384456)..(1384456): a, c, g or t
  modified_base (1384462)..(1384466): a, c, g or t
  modified_base (1384475)..(1384478): a, c, g or t
  modified_base (1384525)..(1384525): a, c, g or t
  modified_base (1384529)..(1384529): a, c, g or t
  modified_base (1384533)..(1384547): a, c, g or t
  modified_base (1384556)..(1384557): a, c, g or t
  modified_base (1384670)..(1384670): a, c, g or t
  modified_base (1385004)..(1385007): a, c, g or t
  modified_base (1385009)..(1385011): a, c, g or t
  modified_base (1385026)..(1385026): a, c, g or t
  modified_base (1385107)..(1385109): a, c, g or t
  modified_base (1385288)..(1385288): a, c, g or t
  modified_base (1385378)..(1385416): a, c, g or t
  modified_base (1385532)..(1385532): a, c, g or t
  modified_base (1385598)..(1385598): a, c, g or t
  modified_base (1385607)..(1385648): a, c, g or t
  modified_base (1385779)..(1385784): a, c, g or t
  modified_base (1385874)..(1385874): a, c, g or t
  modified_base (1385995)..(1385997): a, c, g or t
  modified_base (1386004)..(1386005): a, c, g or t
  modified_base (1386011)..(1386011): a, c, g or t
  modified_base (1386237)..(1386237): a, c, g or t
  modified_base (1386292)..(1386292): a, c, g or t
  modified_base (1386321)..(1386323): a, c, g or t
  modified_base (1386325)..(1386326): a, c, g or t
  modified_base (1386385)..(1386385): a, c, g or t
  modified_base (1386460)..(1386463): a, c, g or t
  modified_base (1386563)..(1386567): a, c, g or t
  modified_base (1386571)..(1386571): a, c, g or t
  modified_base (1386574)..(1386574): a, c, g or t
  modified_base (1386838)..(1386838): a, c, g or t
  modified_base (1386873)..(1386873): a, c, g or t
  modified_base (1386883)..(1386883): a, c, g or t
  modified_base (1386904)..(1386904): a, c, g or t
  modified_base (1386919)..(1386919): a, c, g or t
  modified_base (1386958)..(1386958): a, c, g or t
  modified_base (1386990)..(1386990): a, c, g or t
  modified_base (1386997)..(1386997): a, c, g or t
  modified_base (1387190)..(1387204): a, c, g or t
  modified_base (1387249)..(1387249): a, c, g or t
  modified_base (1387300)..(1387300): a, c, g or t
  modified_base (1387321)..(1387321): a, c, g or t
  modified_base (1387372)..(1387372): a, c, g or t
  modified_base (1387384)..(1387384): a, c, g or t
  modified_base (1387429)..(1387607): a, c, g or t
  modified_base (1387647)..(1387715): a, c, g or t
  modified_base (1387718)..(1387721): a, c, g or t
  modified_base (1387730)..(1387731): a, c, g or t
  modified_base (1387792)..(1387854): a, c, g or t
  modified_base (1387889)..(1387935): a, c, g or t
  modified_base (1387938)..(1387940): a, c, g or t
  modified_base (1387946)..(1387947): a, c, g or t
  modified_base (1387977)..(1387978): a, c, g or t
  modified_base (1387980)..(1388001): a, c, g or t
  modified_base (1388011)..(1388012): a, c, g or t
  modified_base (1388016)..(1388019): a, c, g or t
  modified_base (1388115)..(1388119): a, c, g or t
  modified_base (1388122)..(1388122): a, c, g or t
  modified_base (1388137)..(1388142): a, c, g or t
  modified_base (1388173)..(1388186): a, c, g or t
  modified_base (1388210)..(1388219): a, c, g or t
  modified_base (1388224)..(1388224): a, c, g or t
  modified_base (1388271)..(1388355): a, c, g or t
  modified_base (1388357)..(1388358): a, c, g or t
  modified_base (1388406)..(1388495): a, c, g or t
  modified_base (1388522)..(1388522): a, c, g or t
  modified_base (1388593)..(1388630): a, c, g or t
  modified_base (1388633)..(1388633): a, c, g or t
  modified_base (1388669)..(1388738): a, c, g or t
  modified_base (1388775)..(1388844): a, c, g or t
  modified_base (1388871)..(1388937): a, c, g or t
  modified_base (1388961)..(1389295): a, c, g or t
  modified_base (1389305)..(1389308): a, c, g or t
  modified_base (1389331)..(1389406): a, c, g or t
  modified_base (1389430)..(1389543): a, c, g or t
  modified_base (1389569)..(1389569): a, c, g or t
  modified_base (1389571)..(1389572): a, c, g or t
  modified_base (1389574)..(1389575): a, c, g or t
  modified_base (1389577)..(1389618): a, c, g or t
  modified_base (1389700)..(1389704): a, c, g or t
  modified_base (1389718)..(1389719): a, c, g or t
  modified_base (1389764)..(1389803): a, c, g or t
  modified_base (1389805)..(1389806): a, c, g or t
  modified_base (1389865)..(1389866): a, c, g or t
  modified_base (1389889)..(1389890): a, c, g or t
  modified_base (1389919)..(1390076): a, c, g or t
  modified_base (1390078)..(1390082): a, c, g or t
  modified_base (1390124)..(1390145): a, c, g or t
  modified_base (1390159)..(1390159): a, c, g or t
  modified_base (1390172)..(1390173): a, c, g or t
  modified_base (1390175)..(1390182): a, c, g or t
  modified_base (1390208)..(1390208): a, c, g or t
  modified_base (1390224)..(1390253): a, c, g or t
  modified_base (1390386)..(1390427): a, c, g or t
  modified_base (1390459)..(1390466): a, c, g or t
  modified_base (1390518)..(1390522): a, c, g or t
  modified_base (1390551)..(1390554): a, c, g or t
  modified_base (1390556)..(1390612): a, c, g or t
  modified_base (1390642)..(1390682): a, c, g or t
  modified_base (1390718)..(1390719): a, c, g or t
  modified_base (1390752)..(1390765): a, c, g or t
  modified_base (1390789)..(1390841): a, c, g or t
  modified_base (1390853)..(1390854): a, c, g or t
  modified_base (1390865)..(1390954): a, c, g or t
  modified_base (1390994)..(1391033): a, c, g or t
  modified_base (1391058)..(1391174): a, c, g or t
  modified_base (1391206)..(1391240): a, c, g or t
  modified_base (1391263)..(1391305): a, c, g or t
  modified_base (1391334)..(1391384): a, c, g or t
  modified_base (1391604)..(1391655): a, c, g or t
  modified_base (1391681)..(1391693): a, c, g or t
  modified_base (1391724)..(1391724): a, c, g or t
  modified_base (1391729)..(1391729): a, c, g or t
  modified_base (1391807)..(1391810): a, c, g or t
  modified_base (1391855)..(1391862): a, c, g or t
  modified_base (1391923)..(1391925): a, c, g or t
  modified_base (1391968)..(1391969): a, c, g or t
  modified_base (1392020)..(1392071): a, c, g or t
  modified_base (1392074)..(1392074): a, c, g or t
  modified_base (1392324)..(1392332): a, c, g or t
  modified_base (1392335)..(1392338): a, c, g or t
  modified_base (1392360)..(1392360): a, c, g or t
  modified_base (1392399)..(1392399): a, c, g or t
  modified_base (1392404)..(1392410): a, c, g or t
  modified_base (1392420)..(1392421): a, c, g or t
  modified_base (1392434)..(1392440): a, c, g or t
  modified_base (1392487)..(1392490): a, c, g or t
  modified_base (1392492)..(1392499): a, c, g or t
  modified_base (1392528)..(1392550): a, c, g or t
  modified_base (1392562)..(1392563): a, c, g or t
  modified_base (1392579)..(1392580): a, c, g or t
  modified_base (1392583)..(1392585): a, c, g or t
  modified_base (1392587)..(1392588): a, c, g or t
  modified_base (1392630)..(1392641): a, c, g or t
  modified_base (1392691)..(1392703): a, c, g or t
  modified_base (1392756)..(1392803): a, c, g or t
  modified_base (1392853)..(1392856): a, c, g or t
  modified_base (1392858)..(1392977): a, c, g or t
  modified_base (1393015)..(1393015): a, c, g or t
  modified_base (1393038)..(1393079): a, c, g or t
  modified_base (1393107)..(1393153): a, c, g or t
  modified_base (1393155)..(1393155): a, c, g or t
  modified_base (1393221)..(1393222): a, c, g or t
  modified_base (1393233)..(1393234): a, c, g or t
  modified_base (1393236)..(1393237): a, c, g or t
  modified_base (1393470)..(1393470): a, c, g or t
  modified_base (1393576)..(1393577): a, c, g or t
  modified_base (1393598)..(1393599): a, c, g or t
  modified_base (1393872)..(1393872): a, c, g or t
  modified_base (1393897)..(1393897): a, c, g or t
  modified_base (1393959)..(1393960): a, c, g or t
  modified_base (1394228)..(1394228): a, c, g or t
  modified_base (1394231)..(1394232): a, c, g or t
  modified_base (1394252)..(1394252): a, c, g or t
  modified_base (1395101)..(1395101): a, c, g or t
  modified_base (1395200)..(1395201): a, c, g or t
  modified_base (1395353)..(1395353): a, c, g or t
  modified_base (1396060)..(1396060): a, c, g or t
  modified_base (1396339)..(1396339): a, c, g or t
  modified_base (1396403)..(1396403): a, c, g or t
  modified_base (1396406)..(1396410): a, c, g or t
  modified_base (1396769)..(1396783): a, c, g or t
  modified_base (1397426)..(1397426): a, c, g or t
  modified_base (1397848)..(1397848): a, c, g or t
  modified_base (1397855)..(1397855): a, c, g or t
  modified_base (1398406)..(1398407): a, c, g or t
  modified_base (1398534)..(1398548): a, c, g or t
  modified_base (1398602)..(1398603): a, c, g or t
  modified_base (1398617)..(1398618): a, c, g or t
  modified_base (1398620)..(1398622): a, c, g or t
  modified_base (1398627)..(1398634): a, c, g or t
  modified_base (1398638)..(1398638): a, c, g or t
  modified_base (1398641)..(1398642): a, c, g or t
  modified_base (1398705)..(1398705): a, c, g or t
  modified_base (1398792)..(1398792): a, c, g or t
  modified_base (1398816)..(1398816): a, c, g or t
  modified_base (1398849)..(1398859): a, c, g or t
  modified_base (1398861)..(1398862): a, c, g or t
  modified_base (1398883)..(1398907): a, c, g or t
  modified_base (1398909)..(1398910): a, c, g or t
  modified_base (1398942)..(1398942): a, c, g or t
  modified_base (1399172)..(1399172): a, c, g or t
  modified_base (1399260)..(1399260): a, c, g or t
  modified_base (1399310)..(1399310): a, c, g or t
  modified_base (1399315)..(1399315): a, c, g or t
  modified_base (1399426)..(1399426): a, c, g or t
  modified_base (1399450)..(1399450): a, c, g or t
  modified_base (1399577)..(1399577): a, c, g or t
  modified_base (1399778)..(1399781): a, c, g or t
  modified_base (1399787)..(1399823): a, c, g or t
  modified_base (1400090)..(1400090): a, c, g or t
  modified_base (1400105)..(1400109): a, c, g or t
  modified_base (1400124)..(1400163): a, c, g or t
  modified_base (1400207)..(1400247): a, c, g or t
  modified_base (1400552)..(1400553): a, c, g or t
  modified_base (1400979)..(1400983): a, c, g or t
  modified_base (1405255)..(1405260): a, c, g or t
  modified_base (1405494)..(1405505): a, c, g or t
  modified_base (1406417)..(1406417): a, c, g or t
  modified_base (1406764)..(1406764): a, c, g or t
  modified_base (1406792)..(1406793): a, c, g or t
  modified_base (1406797)..(1406805): a, c, g or t
  modified_base (1406830)..(1406831): a, c, g or t
  modified_base (1406883)..(1406884): a, c, g or t
  modified_base (1406886)..(1406889): a, c, g or t
  modified_base (1407458)..(1407504): a, c, g or t
  modified_base (1407507)..(1407508): a, c, g or t
  modified_base (1407891)..(1407891): a, c, g or t
  modified_base (1408275)..(1408280): a, c, g or t
  modified_base (1408933)..(1408934): a, c, g or t
  modified_base (1409218)..(1409219): a, c, g or t
  modified_base (1409708)..(1409708): a, c, g or t
  modified_base (1412823)..(1412826): a, c, g or t
  modified_base (1413103)..(1413104): a, c, g or t
  modified_base (1413106)..(1413107): a, c, g or t
  modified_base (1414767)..(1414767): a, c, g or t
  modified_base (1415091)..(1415091): a, c, g or t
  modified_base (1416038)..(1416044): a, c, g or t
  modified_base (1416903)..(1416903): a, c, g or t
  modified_base (1418014)..(1418014): a, c, g or t
  modified_base (1418338)..(1418338): a, c, g or t
  modified_base (1419031)..(1419040): a, c, g or t
  modified_base (1421619)..(1421619): a, c, g or t
  modified_base (1421628)..(1421629): a, c, g or t
  modified_base (1423341)..(1423341): a, c, g or t
  modified_base (1427439)..(1427439): a, c, g or t
  modified_base (1427546)..(1427551): a, c, g or t
  modified_base (1427913)..(1427913): a, c, g or t
  modified_base (1432186)..(1432189): a, c, g or t
  modified_base (1432998)..(1432998): a, c, g or t
  modified_base (1433516)..(1433523): a, c, g or t
  modified_base (1437134)..(1437137): a, c, g or t
  modified_base (1437426)..(1437426): a, c, g or t
  modified_base (1438534)..(1438534): a, c, g or t
  modified_base (1439640)..(1439640): a, c, g or t
  modified_base (1441530)..(1441530): a, c, g or t
  modified_base (1442941)..(1442965): a, c, g or t
  modified_base (1443380)..(1443381): a, c, g or t
  modified_base (1443541)..(1443544): a, c, g or t
  modified_base (1445050)..(1445050): a, c, g or t
  modified_base (1445178)..(1445178): a, c, g or t
  modified_base (1445340)..(1445344): a, c, g or t
  modified_base (1445752)..(1445752): a, c, g or t
  modified_base (1445757)..(1445757): a, c, g or t
  modified_base (1447007)..(1447007): a, c, g or t
  modified_base (1447062)..(1447062): a, c, g or t
  modified_base (1447088)..(1447088): a, c, g or t
  modified_base (1447499)..(1447499): a, c, g or t
  modified_base (1447684)..(1447684): a, c, g or t
  modified_base (1450086)..(1450091): a, c, g or t
  modified_base (1450413)..(1450413): a, c, g or t
  modified_base (1450416)..(1450416): a, c, g or t
  modified_base (1450987)..(1450987): a, c, g or t
  modified_base (1451157)..(1451157): a, c, g or t
  modified_base (1451872)..(1451872): a, c, g or t
  modified_base (1453118)..(1453118): a, c, g or t
  modified_base (1457272)..(1457272): a, c, g or t
  modified_base (1458070)..(1458070): a, c, g or t
  modified_base (1459429)..(1459430): a, c, g or t
  modified_base (1461997)..(1461998): a, c, g or t
  modified_base (1462539)..(1462539): a, c, g or t
  modified_base (1463127)..(1463130): a, c, g or t
  modified_base (1464818)..(1464818): a, c, g or t
  modified_base (1466171)..(1466171): a, c, g or t
  modified_base (1467834)..(1467834): a, c, g or t
  modified_base (1471769)..(1471769): a, c, g or t
  modified_base (1471797)..(1471797): a, c, g or t
  modified_base (1472999)..(1473000): a, c, g or t
  modified_base (1474026)..(1474026): a, c, g or t
  modified_base (1474427)..(1474427): a, c, g or t
  modified_base (1475844)..(1475851): a, c, g or t
  modified_base (1475865)..(1475866): a, c, g or t
  modified_base (1476712)..(1476712): a, c, g or t
  modified_base (1476923)..(1476923): a, c, g or t
  modified_base (1476940)..(1476940): a, c, g or t
  modified_base (1481318)..(1481322): a, c, g or t
  modified_base (1481908)..(1481908): a, c, g or t
  modified_base (1482389)..(1482389): a, c, g or t
  modified_base (1483287)..(1483287): a, c, g or t
  modified_base (1484902)..(1484902): a, c, g or t
  modified_base (1485652)..(1485652): a, c, g or t
  modified_base (1486788)..(1486788): a, c, g or t
  modified_base (1487836)..(1487836): a, c, g or t
  modified_base (1487857)..(1487857): a, c, g or t
  modified_base (1487972)..(1487972): a, c, g or t
  modified_base (1487975)..(1487975): a, c, g or t
  modified_base (1488366)..(1488366): a, c, g or t
  modified_base (1489246)..(1489246): a, c, g or t
  modified_base (1490015)..(1490019): a, c, g or t
  modified_base (1490196)..(1490196): a, c, g or t
  modified_base (1492278)..(1492278): a, c, g or t
  modified_base (1493706)..(1493706): a, c, g or t
  modified_base (1493929)..(1493930): a, c, g or t
  modified_base (1494624)..(1494624): a, c, g or t
  modified_base (1495870)..(1495880): a, c, g or t
  modified_base (1496006)..(1496012): a, c, g or t
  modified_base (1497023)..(1497023): a, c, g or t
  modified_base (1497069)..(1497073): a, c, g or t
  modified_base (1497757)..(1497757): a, c, g or t
  modified_base (1497759)..(1497759): a, c, g or t
  modified_base (1499384)..(1499384): a, c, g or t
  modified_base (1499708)..(1499708): a, c, g or t
  modified_base (1499938)..(1499953): a, c, g or t
  modified_base (1500773)..(1500791): a, c, g or t
  modified_base (1501228)..(1501228): a, c, g or t
  modified_base (1501911)..(1501916): a, c, g or t
  modified_base (1502298)..(1502298): a, c, g or t
  modified_base (1502389)..(1502389): a, c, g or t
  modified_base (1502394)..(1502394): a, c, g or t
  modified_base (1502573)..(1502575): a, c, g or t
  modified_base (1502577)..(1502577): a, c, g or t
  modified_base (1502603)..(1502607): a, c, g or t
  modified_base (1502610)..(1502610): a, c, g or t
  modified_base (1502622)..(1502622): a, c, g or t
  modified_base (1502652)..(1502652): a, c, g or t
  modified_base (1502694)..(1502700): a, c, g or t
  modified_base (1502705)..(1502706): a, c, g or t
  modified_base (1502762)..(1502768): a, c, g or t
  modified_base (1502772)..(1502773): a, c, g or t
  modified_base (1502789)..(1502816): a, c, g or t
  modified_base (1502848)..(1502854): a, c, g or t
  modified_base (1502933)..(1502950): a, c, g or t
  modified_base (1502956)..(1502956): a, c, g or t
  modified_base (1503060)..(1503060): a, c, g or t
  modified_base (1503096)..(1503099): a, c, g or t
  modified_base (1503183)..(1503183): a, c, g or t
  modified_base (1504519)..(1504519): a, c, g or t
  modified_base (1505266)..(1505269): a, c, g or t
  modified_base (1505400)..(1505400): a, c, g or t
  modified_base (1506851)..(1506851): a, c, g or t
  modified_base (1506853)..(1506854): a, c, g or t
  modified_base (1506856)..(1506857): a, c, g or t
  modified_base (1507910)..(1507910): a, c, g or t
  modified_base (1508335)..(1508339): a, c, g or t
  modified_base (1509137)..(1509137): a, c, g or t
  modified_base (1509752)..(1509752): a, c, g or t
  modified_base (1510869)..(1510869): a, c, g or t
  modified_base (1510915)..(1510915): a, c, g or t
  modified_base (1511381)..(1511381): a, c, g or t
  modified_base (1511406)..(1511406): a, c, g or t
  modified_base (1512185)..(1512186): a, c, g or t
  modified_base (1512190)..(1512191): a, c, g or t
  modified_base (1512837)..(1512837): a, c, g or t
  modified_base (1513073)..(1513073): a, c, g or t
  modified_base (1513612)..(1513616): a, c, g or t
  modified_base (1513714)..(1513714): a, c, g or t
  modified_base (1514240)..(1514240): a, c, g or t
  modified_base (1514277)..(1514513): a, c, g or t
  modified_base (1514528)..(1514532): a, c, g or t
  modified_base (1514564)..(1514564): a, c, g or t
  modified_base (1514616)..(1514859): a, c, g or t
  modified_base (1514889)..(1514937): a, c, g or t
  modified_base (1514950)..(1514950): a, c, g or t
  modified_base (1514972)..(1514972): a, c, g or t
  modified_base (1514977)..(1515019): a, c, g or t
  modified_base (1515030)..(1515031): a, c, g or t
  modified_base (1515055)..(1515098): a, c, g or t
  modified_base (1515119)..(1515120): a, c, g or t
  modified_base (1515132)..(1515179): a, c, g or t
  modified_base (1515182)..(1515183): a, c, g or t
  modified_base (1515213)..(1515263): a, c, g or t
  modified_base (1515290)..(1515444): a, c, g or t
  modified_base (1515451)..(1515452): a, c, g or t
  modified_base (1515456)..(1515457): a, c, g or t
  modified_base (1515461)..(1515462): a, c, g or t
  modified_base (1515483)..(1515483): a, c, g or t
  modified_base (1515490)..(1515564): a, c, g or t
  modified_base (1515595)..(1515707): a, c, g or t
  modified_base (1515718)..(1515719): a, c, g or t
  modified_base (1515724)..(1515727): a, c, g or t
  modified_base (1515731)..(1515736): a, c, g or t
  modified_base (1515738)..(1515738): a, c, g or t
  modified_base (1515747)..(1515748): a, c, g or t
  modified_base (1515758)..(1515801): a, c, g or t
  modified_base (1515928)..(1515928): a, c, g or t
  modified_base (1515937)..(1515937): a, c, g or t
  modified_base (1515940)..(1515940): a, c, g or t
  modified_base (1515943)..(1515943): a, c, g or t
  modified_base (1515967)..(1516010): a, c, g or t
  modified_base (1516074)..(1516138): a, c, g or t
  modified_base (1516149)..(1516149): a, c, g or t
  modified_base (1516154)..(1516154): a, c, g or t
  modified_base (1516221)..(1516225): a, c, g or t
  modified_base (1516376)..(1516396): a, c, g or t
  modified_base (1516402)..(1516402): a, c, g or t
  modified_base (1516486)..(1516493): a, c, g or t
  modified_base (1516537)..(1516590): a, c, g or t
  modified_base (1516592)..(1516593): a, c, g or t
  modified_base (1516632)..(1516633): a, c, g or t
  modified_base (1516635)..(1516640): a, c, g or t
  modified_base (1516654)..(1516654): a, c, g or t
  modified_base (1516664)..(1516665): a, c, g or t
  modified_base (1516671)..(1516923): a, c, g or t
  modified_base (1516929)..(1516931): a, c, g or t
  modified_base (1516946)..(1516946): a, c, g or t
  modified_base (1516977)..(1517031): a, c, g or t
  modified_base (1517090)..(1517207): a, c, g or t
  modified_base (1517216)..(1517217): a, c, g or t
  modified_base (1517229)..(1517352): a, c, g or t
  modified_base (1517381)..(1517392): a, c, g or t
  modified_base (1517406)..(1517406): a, c, g or t
  modified_base (1517439)..(1517498): a, c, g or t
  modified_base (1517501)..(1517502): a, c, g or t
  modified_base (1517536)..(1517579): a, c, g or t
  modified_base (1517607)..(1517650): a, c, g or t
  modified_base (1517667)..(1517668): a, c, g or t
  modified_base (1517716)..(1517719): a, c, g or t
  modified_base (1517755)..(1517799): a, c, g or t
  modified_base (1517862)..(1517899): a, c, g or t
  modified_base (1517932)..(1517932): a, c, g or t
  modified_base (1517935)..(1518237): a, c, g or t
  modified_base (1518270)..(1518273): a, c, g or t
  modified_base (1518275)..(1518334): a, c, g or t
  modified_base (1518378)..(1518392): a, c, g or t
  modified_base (1518408)..(1518408): a, c, g or t
  modified_base (1518416)..(1518425): a, c, g or t
  modified_base (1518444)..(1518445): a, c, g or t
  modified_base (1518449)..(1518450): a, c, g or t
  modified_base (1518454)..(1518454): a, c, g or t
  modified_base (1518474)..(1518479): a, c, g or t
  modified_base (1518503)..(1518531): a, c, g or t
  modified_base (1518540)..(1518540): a, c, g or t
  modified_base (1518552)..(1518552): a, c, g or t
  modified_base (1518555)..(1518576): a, c, g or t
  modified_base (1518600)..(1518607): a, c, g or t
  modified_base (1518634)..(1518644): a, c, g or t
  modified_base (1518668)..(1518718): a, c, g or t
  modified_base (1518743)..(1518743): a, c, g or t
  modified_base (1518763)..(1518930): a, c, g or t
  modified_base (1518954)..(1519119): a, c, g or t
  modified_base (1519207)..(1519254): a, c, g or t
  modified_base (1519258)..(1519259): a, c, g or t
  modified_base (1519333)..(1519339): a, c, g or t
  modified_base (1520026)..(1520026): a, c, g or t
  modified_base (1520112)..(1520112): a, c, g or t
  modified_base (1520177)..(1520177): a, c, g or t
  modified_base (1520230)..(1520234): a, c, g or t
  modified_base (1520273)..(1520273): a, c, g or t
  modified_base (1520309)..(1520309): a, c, g or t
  modified_base (1520596)..(1520598): a, c, g or t
  modified_base (1520654)..(1520668): a, c, g or t
  modified_base (1520693)..(1520737): a, c, g or t
  modified_base (1520809)..(1520824): a, c, g or t
  modified_base (1520894)..(1521090): a, c, g or t
  modified_base (1521094)..(1521095): a, c, g or t
  modified_base (1521113)..(1521115): a, c, g or t
  modified_base (1521149)..(1521150): a, c, g or t
  modified_base (1521189)..(1521200): a, c, g or t
  modified_base (1521209)..(1521210): a, c, g or t
  modified_base (1521212)..(1521215): a, c, g or t
  modified_base (1521218)..(1521219): a, c, g or t
  modified_base (1521221)..(1521222): a, c, g or t
  modified_base (1521224)..(1521254): a, c, g or t
  modified_base (1521256)..(1521257): a, c, g or t
  modified_base (1521260)..(1521261): a, c, g or t
  modified_base (1521270)..(1521271): a, c, g or t
  modified_base (1521301)..(1521311): a, c, g or t
  modified_base (1521315)..(1521316): a, c, g or t
  modified_base (1521361)..(1521362): a, c, g or t
  modified_base (1521367)..(1521367): a, c, g or t
  modified_base (1521465)..(1521465): a, c, g or t
  modified_base (1521526)..(1521527): a, c, g or t
  modified_base (1521531)..(1521532): a, c, g or t
  modified_base (1521606)..(1521607): a, c, g or t
  modified_base (1521611)..(1521612): a, c, g or t
  modified_base (1521626)..(1521627): a, c, g or t
  modified_base (1521629)..(1521630): a, c, g or t
  modified_base (1521662)..(1521663): a, c, g or t
  modified_base (1521666)..(1521667): a, c, g or t
  modified_base (1521759)..(1521760): a, c, g or t
  modified_base (1521762)..(1521763): a, c, g or t
  modified_base (1522278)..(1522281): a, c, g or t
  modified_base (1522332)..(1522335): a, c, g or t
  modified_base (1522338)..(1522339): a, c, g or t
  modified_base (1522576)..(1522579): a, c, g or t
  modified_base (1522742)..(1522743): a, c, g or t
  modified_base (1522935)..(1522938): a, c, g or t
  modified_base (1522969)..(1522970): a, c, g or t
  modified_base (1522974)..(1523047): a, c, g or t
  modified_base (1523071)..(1523076): a, c, g or t
  modified_base (1523111)..(1523112): a, c, g or t
  modified_base (1523115)..(1523116): a, c, g or t
  modified_base (1523119)..(1523272): a, c, g or t
  modified_base (1523296)..(1523306): a, c, g or t
  modified_base (1523338)..(1523382): a, c, g or t
  modified_base (1523404)..(1523414): a, c, g or t
  modified_base (1523418)..(1523419): a, c, g or t
  modified_base (1523438)..(1523440): a, c, g or t
  modified_base (1523483)..(1523506): a, c, g or t
  modified_base (1523532)..(1524912): a, c, g or t
  modified_base (1524936)..(1524963): a, c, g or t
  modified_base (1524968)..(1524969): a, c, g or t
  modified_base (1524995)..(1524995): a, c, g or t
  modified_base (1525020)..(1525045): a, c, g or t
  modified_base (1525065)..(1525065): a, c, g or t
  modified_base (1525068)..(1525107): a, c, g or t
  modified_base (1525111)..(1525111): a, c, g or t
  modified_base (1525128)..(1525175): a, c, g or t
  modified_base (1525780)..(1525780): a, c, g or t
  modified_base (1526424)..(1526425): a, c, g or t
  modified_base (1526429)..(1526431): a, c, g or t
  modified_base (1526436)..(1526442): a, c, g or t
  modified_base (1526445)..(1526447): a, c, g or t
  modified_base (1526467)..(1526468): a, c, g or t
  modified_base (1526474)..(1526492): a, c, g or t
  modified_base (1526514)..(1526514): a, c, g or t
  modified_base (1526520)..(1526523): a, c, g or t
  modified_base (1526525)..(1526528): a, c, g or t
  modified_base (1526537)..(1526538): a, c, g or t
  modified_base (1526542)..(1526543): a, c, g or t
  modified_base (1526545)..(1526547): a, c, g or t
  modified_base (1526551)..(1526552): a, c, g or t
  modified_base (1526556)..(1526557): a, c, g or t
  modified_base (1526571)..(1526849): a, c, g or t
  modified_base (1526873)..(1527022): a, c, g or t
  modified_base (1527035)..(1527035): a, c, g or t
  modified_base (1527047)..(1527048): a, c, g or t
  modified_base (1527057)..(1527058): a, c, g or t
  modified_base (1527069)..(1527070): a, c, g or t
  modified_base (1528400)..(1528446): a, c, g or t
  modified_base (1528641)..(1528642): a, c, g or t
  modified_base (1528674)..(1528677): a, c, g or t
  modified_base (1528828)..(1528829): a, c, g or t
  modified_base (1528862)..(1528863): a, c, g or t
  modified_base (1529032)..(1529032): a, c, g or t
  modified_base (1529338)..(1529339): a, c, g or t
  modified_base (1529848)..(1529851): a, c, g or t
  modified_base (1529854)..(1529854): a, c, g or t
  modified_base (1530014)..(1530014): a, c, g or t
  modified_base (1530088)..(1530088): a, c, g or t
  modified_base (1530304)..(1530304): a, c, g or t
  modified_base (1530380)..(1530381): a, c, g or t
  modified_base (1530383)..(1530383): a, c, g or t
  modified_base (1530385)..(1530388): a, c, g or t
  modified_base (1530956)..(1530956): a, c, g or t
  modified_base (1531783)..(1531783): a, c, g or t
  modified_base (1531891)..(1531891): a, c, g or t
  modified_base (1531899)..(1531899): a, c, g or t
  modified_base (1532702)..(1532702): a, c, g or t
  modified_base (1536239)..(1536239): a, c, g or t
  modified_base (1536639)..(1536639): a, c, g or t
  modified_base (1537969)..(1537974): a, c, g or t
  modified_base (1537979)..(1537979): a, c, g or t
  modified_base (1538592)..(1538592): a, c, g or t
  modified_base (1539373)..(1539376): a, c, g or t
  modified_base (1540736)..(1540736): a, c, g or t
  modified_base (1540995)..(1540995): a, c, g or t
  modified_base (1540997)..(1541000): a, c, g or t
  modified_base (1541715)..(1541715): a, c, g or t
  modified_base (1542031)..(1542031): a, c, g or t
  modified_base (1543653)..(1543653): a, c, g or t
  modified_base (1544249)..(1544252): a, c, g or t
  modified_base (1545249)..(1545252): a, c, g or t
  modified_base (1545537)..(1545540): a, c, g or t
  modified_base (1547198)..(1547198): a, c, g or t
  modified_base (1547832)..(1547832): a, c, g or t
  modified_base (1549519)..(1549520): a, c, g or t
  modified_base (1550557)..(1550563): a, c, g or t
  modified_base (1552254)..(1552254): a, c, g or t
  modified_base (1552650)..(1552650): a, c, g or t
  modified_base (1553140)..(1553140): a, c, g or t
  modified_base (1555936)..(1555936): a, c, g or t
  modified_base (1558124)..(1558128): a, c, g or t
  modified_base (1563281)..(1563281): a, c, g or t
  modified_base (1563358)..(1563378): a, c, g or t
  modified_base (1565745)..(1565745): a, c, g or t
  modified_base (1566104)..(1566107): a, c, g or t
  modified_base (1566621)..(1566621): a, c, g or t
  modified_base (1566630)..(1566630): a, c, g or t
  modified_base (1567579)..(1567579): a, c, g or t
  modified_base (1568515)..(1568515): a, c, g or t
  modified_base (1568997)..(1568997): a, c, g or t
  modified_base (1569281)..(1569281): a, c, g or t
  modified_base (1570168)..(1570169): a, c, g or t
  modified_base (1570171)..(1570190): a, c, g or t
  modified_base (1573347)..(1573347): a, c, g or t
  modified_base (1573626)..(1573627): a, c, g or t
  modified_base (1573631)..(1573632): a, c, g or t
  modified_base (1573634)..(1573637): a, c, g or t
  modified_base (1577304)..(1577304): a, c, g or t
  modified_base (1577306)..(1577309): a, c, g or t
  modified_base (1579368)..(1579379): a, c, g or t
  modified_base (1579382)..(1579382): a, c, g or t
  modified_base (1581352)..(1581352): a, c, g or t
  modified_base (1581517)..(1581517): a, c, g or t
  modified_base (1581645)..(1581645): a, c, g or t
  modified_base (1581977)..(1581977): a, c, g or t
  modified_base (1583856)..(1583856): a, c, g or t
  modified_base (1584635)..(1584635): a, c, g or t
  modified_base (1585239)..(1585240): a, c, g or t
  modified_base (1585535)..(1585538): a, c, g or t
  modified_base (1588007)..(1588007): a, c, g or t
  modified_base (1588033)..(1588033): a, c, g or t
  modified_base (1588400)..(1588403): a, c, g or t
  modified_base (1591039)..(1591039): a, c, g or t
  modified_base (1591400)..(1591401): a, c, g or t
  modified_base (1591418)..(1591418): a, c, g or t
  modified_base (1593874)..(1593875): a, c, g or t
  modified_base (1593877)..(1593880): a, c, g or t
  modified_base (1597600)..(1597600): a, c, g or t
  modified_base (1598156)..(1598156): a, c, g or t
  modified_base (1598577)..(1598577): a, c, g or t
  modified_base (1599260)..(1599260): a, c, g or t
  modified_base (1600606)..(1600606): a, c, g or t
  modified_base (1601553)..(1601556): a, c, g or t
  modified_base (1602674)..(1602674): a, c, g or t
  modified_base (1602680)..(1602680): a, c, g or t
  modified_base (1602740)..(1602740): a, c, g or t
  modified_base (1605340)..(1605340): a, c, g or t
  modified_base (1606420)..(1606420): a, c, g or t
  modified_base (1608402)..(1608402): a, c, g or t
  modified_base (1609525)..(1609525): a, c, g or t
  modified_base (1609705)..(1609706): a, c, g or t
  modified_base (1610253)..(1610253): a, c, g or t
  modified_base (1613661)..(1613676): a, c, g or t
  modified_base (1615254)..(1615254): a, c, g or t
  modified_base (1615461)..(1615465): a, c, g or t
  modified_base (1617517)..(1617517): a, c, g or t
  modified_base (1619468)..(1619468): a, c, g or t
  modified_base (1619544)..(1619545): a, c, g or t
  modified_base (1619547)..(1619549): a, c, g or t
  modified_base (1619593)..(1619621): a, c, g or t
  modified_base (1619683)..(1619683): a, c, g or t
  modified_base (1622722)..(1622731): a, c, g or t
  modified_base (1622733)..(1622734): a, c, g or t
  modified_base (1623156)..(1623156): a, c, g or t
  modified_base (1628742)..(1628743): a, c, g or t
  modified_base (1631248)..(1631248): a, c, g or t
  modified_base (1632084)..(1632084): a, c, g or t
  modified_base (1633937)..(1633938): a, c, g or t
  modified_base (1636037)..(1636037): a, c, g or t
  modified_base (1636343)..(1636343): a, c, g or t
  modified_base (1636984)..(1636987): a, c, g or t
  modified_base (1637722)..(1637722): a, c, g or t
  modified_base (1637878)..(1637880): a, c, g or t
  modified_base (1638524)..(1638524): a, c, g or t
  modified_base (1640611)..(1640613): a, c, g or t
  modified_base (1640710)..(1640711): a, c, g or t
  modified_base (1640749)..(1640761): a, c, g or t
  modified_base (1641123)..(1641131): a, c, g or t
  modified_base (1642104)..(1642104): a, c, g or t
  modified_base (1642367)..(1642367): a, c, g or t
  modified_base (1643090)..(1643103): a, c, g or t
  modified_base (1643105)..(1643106): a, c, g or t
  modified_base (1643112)..(1643113): a, c, g or t
  modified_base (1643847)..(1643852): a, c, g or t
  modified_base (1646645)..(1646649): a, c, g or t
  modified_base (1646908)..(1646911): a, c, g or t
  modified_base (1648639)..(1648639): a, c, g or t
  modified_base (1649095)..(1649095): a, c, g or t
  modified_base (1649460)..(1649470): a, c, g or t
  modified_base (1655844)..(1655844): a, c, g or t
  modified_base (1655848)..(1655850): a, c, g or t
  modified_base (1656382)..(1656393): a, c, g or t
  modified_base (1657874)..(1657874): a, c, g or t
  modified_base (1660275)..(1660275): a, c, g or t
  modified_base (1661483)..(1661483): a, c, g or t
  modified_base (1661988)..(1661988): a, c, g or t
  modified_base (1662288)..(1662288): a, c, g or t
  modified_base (1662311)..(1662311): a, c, g or t
  modified_base (1662314)..(1662314): a, c, g or t
  modified_base (1664614)..(1664619): a, c, g or t
  modified_base (1666467)..(1666468): a, c, g or t
  modified_base (1666470)..(1666471): a, c, g or t
  modified_base (1667256)..(1667261): a, c, g or t
  modified_base (1672967)..(1672981): a, c, g or t
  modified_base (1673534)..(1673534): a, c, g or t
  modified_base (1673910)..(1673915): a, c, g or t
  modified_base (1674155)..(1674156): a, c, g or t
  modified_base (1674159)..(1674163): a, c, g or t
  modified_base (1678223)..(1678223): a, c, g or t
  modified_base (1680368)..(1680372): a, c, g or t
  modified_base (1682789)..(1682789): a, c, g or t
  modified_base (1684081)..(1684082): a, c, g or t
  modified_base (1684828)..(1684828): a, c, g or t
  modified_base (1686204)..(1686204): a, c, g or t
  modified_base (1687519)..(1687522): a, c, g or t
  modified_base (1694098)..(1694098): a, c, g or t
  modified_base (1696033)..(1696036): a, c, g or t
  modified_base (1696983)..(1696983): a, c, g or t
  modified_base (1698134)..(1698134): a, c, g or t
  modified_base (1699235)..(1699235): a, c, g or t
  modified_base (1699977)..(1699977): a, c, g or t
  modified_base (1700496)..(1700496): a, c, g or t
  modified_base (1701791)..(1701791): a, c, g or t
  modified_base (1702584)..(1702585): a, c, g or t
  modified_base (1702618)..(1702627): a, c, g or t
  modified_base (1702851)..(1702851): a, c, g or t
  modified_base (1704291)..(1704291): a, c, g or t
  modified_base (1704362)..(1704362): a, c, g or t
  modified_base (1706668)..(1706678): a, c, g or t
  modified_base (1706736)..(1706736): a, c, g or t
  modified_base (1706738)..(1706746): a, c, g or t
  modified_base (1711851)..(1711851): a, c, g or t
  modified_base (1712545)..(1712553): a, c, g or t
  modified_base (1712557)..(1712558): a, c, g or t
  modified_base (1712564)..(1712565): a, c, g or t
  modified_base (1712786)..(1712786): a, c, g or t
  modified_base (1712869)..(1712869): a, c, g or t
  modified_base (1713084)..(1713092): a, c, g or t
  modified_base (1713235)..(1713235): a, c, g or t
  modified_base (1713238)..(1713238): a, c, g or t
  modified_base (1713312)..(1713312): a, c, g or t
  modified_base (1713371)..(1713371): a, c, g or t
  modified_base (1713383)..(1713383): a, c, g or t
  modified_base (1713661)..(1713661): a, c, g or t
  modified_base (1715714)..(1715721): a, c, g or t
  modified_base (1716638)..(1716638): a, c, g or t
  modified_base (1716658)..(1716658): a, c, g or t
  modified_base (1716763)..(1716763): a, c, g or t
  modified_base (1717096)..(1717096): a, c, g or t
  modified_base (1717152)..(1717152): a, c, g or t
  modified_base (1717301)..(1717301): a, c, g or t
  modified_base (1717336)..(1717336): a, c, g or t
  modified_base (1717437)..(1717437): a, c, g or t
  modified_base (1717443)..(1717443): a, c, g or t
  modified_base (1717464)..(1717464): a, c, g or t
  modified_base (1717504)..(1717504): a, c, g or t
  modified_base (1717522)..(1717522): a, c, g or t
  modified_base (1717576)..(1717579): a, c, g or t
  modified_base (1717596)..(1717596): a, c, g or t
  modified_base (1717600)..(1717601): a, c, g or t
  modified_base (1717811)..(1717812): a, c, g or t
  modified_base (1717820)..(1717821): a, c, g or t
  modified_base (1718221)..(1718222): a, c, g or t
  modified_base (1718615)..(1718615): a, c, g or t
  modified_base (1718890)..(1718890): a, c, g or t
  modified_base (1719017)..(1719020): a, c, g or t
  modified_base (1719137)..(1719138): a, c, g or t
  modified_base (1719149)..(1719149): a, c, g or t
  modified_base (1719229)..(1719229): a, c, g or t
  modified_base (1719325)..(1719326): a, c, g or t
  modified_base (1719389)..(1719390): a, c, g or t
  modified_base (1719392)..(1719430): a, c, g or t
  modified_base (1719515)..(1719546): a, c, g or t
  modified_base (1719621)..(1719649): a, c, g or t
  modified_base (1719652)..(1719653): a, c, g or t
  modified_base (1719677)..(1719678): a, c, g or t
  modified_base (1719703)..(1719729): a, c, g or t
  modified_base (1719734)..(1719735): a, c, g or t
  modified_base (1719783)..(1719798): a, c, g or t
  modified_base (1719803)..(1719805): a, c, g or t
  modified_base (1719822)..(1719823): a, c, g or t
  modified_base (1719830)..(1719831): a, c, g or t
  modified_base (1719834)..(1719841): a, c, g or t
  modified_base (1719934)..(1719951): a, c, g or t
  modified_base (1720082)..(1720083): a, c, g or t
  modified_base (1720210)..(1720211): a, c, g or t
  modified_base (1720213)..(1720254): a, c, g or t
  modified_base (1720466)..(1720471): a, c, g or t
  modified_base (1720473)..(1720474): a, c, g or t
  modified_base (1720486)..(1720489): a, c, g or t
  modified_base (1720501)..(1720509): a, c, g or t
  modified_base (1720513)..(1720514): a, c, g or t
  modified_base (1720576)..(1720577): a, c, g or t
  modified_base (1720652)..(1720663): a, c, g or t
  modified_base (1720666)..(1720668): a, c, g or t
  modified_base (1720670)..(1720670): a, c, g or t
  modified_base (1720836)..(1720877): a, c, g or t
  modified_base (1720916)..(1720968): a, c, g or t
  modified_base (1721021)..(1721061): a, c, g or t
  modified_base (1721082)..(1721082): a, c, g or t
  modified_base (1721099)..(1721102): a, c, g or t
  modified_base (1721140)..(1721157): a, c, g or t
  modified_base (1721162)..(1721163): a, c, g or t
  modified_base (1721184)..(1721184): a, c, g or t
  modified_base (1721202)..(1721396): a, c, g or t
  modified_base (1721420)..(1721422): a, c, g or t
  modified_base (1721426)..(1721426): a, c, g or t
  modified_base (1721428)..(1721497): a, c, g or t
  modified_base (1721540)..(1721564): a, c, g or t
  modified_base (1721575)..(1721576): a, c, g or t
  modified_base (1721602)..(1721650): a, c, g or t
  modified_base (1721654)..(1721655): a, c, g or t
  modified_base (1721669)..(1721717): a, c, g or t
  modified_base (1721758)..(1721759): a, c, g or t
  modified_base (1721763)..(1721764): a, c, g or t
  modified_base (1721767)..(1721776): a, c, g or t
  modified_base (1721784)..(1721784): a, c, g or t
  modified_base (1721786)..(1721787): a, c, g or t
  modified_base (1721807)..(1721850): a, c, g or t
  modified_base (1721876)..(1721984): a, c, g or t
  modified_base (1722068)..(1722068): a, c, g or t
  modified_base (1722079)..(1722132): a, c, g or t
  modified_base (1722145)..(1722145): a, c, g or t
  modified_base (1722154)..(1722154): a, c, g or t
  modified_base (1722156)..(1722207): a, c, g or t
  modified_base (1722219)..(1722219): a, c, g or t
  modified_base (1722244)..(1722297): a, c, g or t
  modified_base (1722326)..(1722326): a, c, g or t
  modified_base (1722329)..(1722329): a, c, g or t
  modified_base (1722410)..(1722413): a, c, g or t
  modified_base (1722458)..(1722458): a, c, g or t
  modified_base (1722478)..(1722479): a, c, g or t
  modified_base (1722481)..(1722481): a, c, g or t
  modified_base (1722484)..(1722496): a, c, g or t
  modified_base (1722618)..(1722623): a, c, g or t
  modified_base (1722710)..(1722751): a, c, g or t
  modified_base (1722899)..(1722899): a, c, g or t
  modified_base (1722905)..(1722905): a, c, g or t
  modified_base (1722907)..(1722948): a, c, g or t
  modified_base (1722963)..(1722963): a, c, g or t
  modified_base (1723400)..(1723401): a, c, g or t
  modified_base (1723403)..(1723403): a, c, g or t
  modified_base (1723405)..(1723409): a, c, g or t
  modified_base (1723438)..(1723441): a, c, g or t
  modified_base (1723585)..(1723612): a, c, g or t
  modified_base (1723615)..(1723616): a, c, g or t
  modified_base (1723649)..(1723651): a, c, g or t
  modified_base (1723844)..(1723844): a, c, g or t
  modified_base (1723850)..(1723850): a, c, g or t
  modified_base (1723853)..(1723858): a, c, g or t
  modified_base (1723886)..(1723886): a, c, g or t
  modified_base (1723973)..(1723973): a, c, g or t
  modified_base (1724027)..(1724030): a, c, g or t
  modified_base (1724057)..(1724057): a, c, g or t
  modified_base (1724060)..(1724142): a, c, g or t
  modified_base (1724167)..(1724167): a, c, g or t
  modified_base (1724184)..(1724185): a, c, g or t
  modified_base (1724190)..(1724191): a, c, g or t
  modified_base (1724193)..(1724261): a, c, g or t
  modified_base (1724263)..(1724263): a, c, g or t
  modified_base (1724271)..(1724271): a, c, g or t
  modified_base (1724292)..(1724292): a, c, g or t
  modified_base (1724305)..(1724305): a, c, g or t
  modified_base (1724383)..(1724383): a, c, g or t
  modified_base (1724482)..(1724482): a, c, g or t
  modified_base (1724568)..(1724568): a, c, g or t
  modified_base (1724574)..(1724615): a, c, g or t
  modified_base (1724674)..(1724719): a, c, g or t
  modified_base (1724733)..(1724733): a, c, g or t
  modified_base (1724745)..(1724745): a, c, g or t
  modified_base (1724748)..(1724748): a, c, g or t
  modified_base (1724970)..(1724970): a, c, g or t
  modified_base (1724996)..(1724999): a, c, g or t
  modified_base (1725006)..(1725006): a, c, g or t
  modified_base (1725142)..(1725142): a, c, g or t
  modified_base (1725155)..(1725195): a, c, g or t
  modified_base (1725300)..(1725356): a, c, g or t
  modified_base (1725360)..(1725363): a, c, g or t
  modified_base (1725532)..(1725572): a, c, g or t
  modified_base (1725593)..(1725634): a, c, g or t
  modified_base (1725642)..(1725642): a, c, g or t
  modified_base (1725647)..(1725647): a, c, g or t
  modified_base (1725676)..(1725717): a, c, g or t
  modified_base (1725797)..(1725797): a, c, g or t
  modified_base (1725998)..(1725998): a, c, g or t
  modified_base (1726013)..(1726013): a, c, g or t
  modified_base (1726016)..(1726016): a, c, g or t
  modified_base (1726124)..(1726169): a, c, g or t
  modified_base (1726214)..(1726214): a, c, g or t
  modified_base (1726231)..(1726232): a, c, g or t
  modified_base (1726234)..(1726279): a, c, g or t
  modified_base (1726281)..(1726281): a, c, g or t
  modified_base (1726326)..(1726326): a, c, g or t
  modified_base (1726332)..(1726332): a, c, g or t
  modified_base (1726365)..(1726365): a, c, g or t
  modified_base (1726419)..(1726419): a, c, g or t
  modified_base (1726461)..(1726503): a, c, g or t
  modified_base (1726525)..(1726525): a, c, g or t
  modified_base (1726539)..(1726542): a, c, g or t
  modified_base (1726579)..(1726579): a, c, g or t
  modified_base (1726594)..(1726594): a, c, g or t
  modified_base (1726596)..(1726597): a, c, g or t
  modified_base (1726669)..(1726669): a, c, g or t
  modified_base (1726686)..(1726727): a, c, g or t
  modified_base (1726780)..(1726780): a, c, g or t
  modified_base (1726843)..(1726885): a, c, g or t
  modified_base (1727024)..(1727068): a, c, g or t
  modified_base (1727076)..(1727078): a, c, g or t
  modified_base (1727123)..(1727162): a, c, g or t
  modified_base (1727188)..(1727190): a, c, g or t
  modified_base (1727192)..(1727198): a, c, g or t
  modified_base (1727997)..(1728040): a, c, g or t
  modified_base (1728092)..(1728142): a, c, g or t
  modified_base (1728345)..(1728345): a, c, g or t
  modified_base (1728352)..(1728394): a, c, g or t
  modified_base (1729055)..(1729101): a, c, g or t
  modified_base (1729106)..(1729107): a, c, g or t
  modified_base (1729118)..(1729118): a, c, g or t
  modified_base (1729125)..(1729247): a, c, g or t
  modified_base (1729334)..(1729375): a, c, g or t
  modified_base (1729400)..(1729437): a, c, g or t
  modified_base (1729457)..(1729497): a, c, g or t
  modified_base (1729627)..(1729627): a, c, g or t
  modified_base (1729871)..(1729875): a, c, g or t
  modified_base (1730030)..(1730030): a, c, g or t
  modified_base (1730039)..(1730039): a, c, g or t
  modified_base (1730041)..(1730042): a, c, g or t
  modified_base (1730046)..(1730046): a, c, g or t
  modified_base (1730393)..(1730393): a, c, g or t
  modified_base (1730396)..(1730396): a, c, g or t
  modified_base (1730403)..(1730406): a, c, g or t
  modified_base (1730509)..(1730509): a, c, g or t
  modified_base (1730973)..(1730973): a, c, g or t
  modified_base (1731592)..(1731593): a, c, g or t
  modified_base (1731985)..(1731985): a, c, g or t
  modified_base (1732375)..(1732375): a, c, g or t
  modified_base (1732378)..(1732378): a, c, g or t
  modified_base (1732544)..(1732544): a, c, g or t
  modified_base (1732570)..(1732573): a, c, g or t
  modified_base (1732581)..(1732581): a, c, g or t
  modified_base (1732913)..(1732913): a, c, g or t
  modified_base (1733050)..(1733050): a, c, g or t
  modified_base (1733063)..(1733063): a, c, g or t
  modified_base (1733084)..(1733084): a, c, g or t
  modified_base (1733088)..(1733088): a, c, g or t
  modified_base (1733189)..(1733189): a, c, g or t
  modified_base (1735459)..(1735459): a, c, g or t
  modified_base (1735585)..(1735585): a, c, g or t
  modified_base (1735712)..(1735712): a, c, g or t
  modified_base (1735895)..(1735895): a, c, g or t
  modified_base (1735940)..(1735940): a, c, g or t
  modified_base (1736132)..(1736132): a, c, g or t
  modified_base (1736158)..(1736165): a, c, g or t
  modified_base (1736263)..(1736263): a, c, g or t
  modified_base (1736303)..(1736315): a, c, g or t
  modified_base (1736352)..(1736352): a, c, g or t
  modified_base (1736547)..(1736547): a, c, g or t
  modified_base (1737058)..(1737058): a, c, g or t
  modified_base (1737133)..(1737133): a, c, g or t
  modified_base (1737178)..(1737178): a, c, g or t
  modified_base (1737189)..(1737189): a, c, g or t
  modified_base (1737201)..(1737204): a, c, g or t
  modified_base (1737314)..(1737318): a, c, g or t
  modified_base (1737330)..(1737330): a, c, g or t
  modified_base (1737452)..(1737452): a, c, g or t
  modified_base (1737497)..(1737497): a, c, g or t
  modified_base (1737831)..(1737831): a, c, g or t
  modified_base (1737875)..(1737875): a, c, g or t
  modified_base (1737894)..(1737894): a, c, g or t
  modified_base (1737935)..(1737935): a, c, g or t
  modified_base (1737956)..(1737974): a, c, g or t
  modified_base (1737992)..(1737993): a, c, g or t
  modified_base (1738001)..(1738002): a, c, g or t
  modified_base (1738006)..(1738006): a, c, g or t
  modified_base (1738071)..(1738071): a, c, g or t
  modified_base (1738083)..(1738083): a, c, g or t
  modified_base (1738125)..(1738125): a, c, g or t
  modified_base (1738138)..(1738138): a, c, g or t
  modified_base (1738156)..(1738156): a, c, g or t
  modified_base (1738194)..(1738194): a, c, g or t
  modified_base (1738281)..(1738281): a, c, g or t
  modified_base (1738370)..(1738370): a, c, g or t
  modified_base (1738376)..(1738376): a, c, g or t
  modified_base (1738441)..(1738441): a, c, g or t
  modified_base (1738462)..(1738463): a, c, g or t
  modified_base (1738465)..(1738467): a, c, g or t
  modified_base (1738528)..(1738528): a, c, g or t
  modified_base (1738543)..(1738543): a, c, g or t
  modified_base (1738596)..(1738596): a, c, g or t
  modified_base (1738686)..(1738686): a, c, g or t
  modified_base (1738698)..(1738698): a, c, g or t
  modified_base (1738726)..(1738726): a, c, g or t
  modified_base (1738780)..(1738835): a, c, g or t
  modified_base (1738863)..(1738918): a, c, g or t
  modified_base (1738922)..(1738923): a, c, g or t
  modified_base (1738927)..(1738928): a, c, g or t
  modified_base (1738964)..(1739004): a, c, g or t
  modified_base (1739026)..(1739068): a, c, g or t
  modified_base (1739070)..(1739071): a, c, g or t
  modified_base (1739090)..(1739096): a, c, g or t
  modified_base (1739126)..(1739126): a, c, g or t
  modified_base (1739181)..(1739224): a, c, g or t
  modified_base (1739233)..(1739233): a, c, g or t
  modified_base (1739280)..(1739280): a, c, g or t
  modified_base (1739283)..(1739283): a, c, g or t
  modified_base (1739322)..(1739322): a, c, g or t
  modified_base (1739364)..(1739364): a, c, g or t
  modified_base (1739484)..(1739484): a, c, g or t
  modified_base (1739488)..(1739499): a, c, g or t
  modified_base (1739507)..(1739510): a, c, g or t
  modified_base (1739553)..(1739553): a, c, g or t
  modified_base (1739610)..(1739610): a, c, g or t
  modified_base (1739613)..(1739613): a, c, g or t
  modified_base (1739628)..(1739628): a, c, g or t
  modified_base (1739633)..(1739633): a, c, g or t
  modified_base (1739661)..(1739661): a, c, g or t
  modified_base (1739757)..(1739763): a, c, g or t
  modified_base (1739812)..(1739909): a, c, g or t
  modified_base (1739934)..(1739976): a, c, g or t
  modified_base (1740136)..(1740136): a, c, g or t
  modified_base (1740187)..(1740204): a, c, g or t
  modified_base (1740238)..(1740238): a, c, g or t
  modified_base (1740343)..(1740343): a, c, g or t
  modified_base (1740410)..(1740410): a, c, g or t
  modified_base (1740413)..(1740452): a, c, g or t
  modified_base (1740454)..(1740454): a, c, g or t
  modified_base (1740599)..(1740640): a, c, g or t
  modified_base (1740661)..(1740664): a, c, g or t
  modified_base (1740735)..(1740735): a, c, g or t
  modified_base (1740756)..(1740756): a, c, g or t
  modified_base (1740761)..(1740764): a, c, g or t
  modified_base (1740766)..(1740783): a, c, g or t
  modified_base (1740865)..(1740904): a, c, g or t
  modified_base (1740907)..(1740908): a, c, g or t
  modified_base (1740987)..(1740987): a, c, g or t
  modified_base (1741043)..(1741043): a, c, g or t
  modified_base (1741048)..(1741051): a, c, g or t
  modified_base (1741060)..(1741101): a, c, g or t
  modified_base (1741147)..(1741150): a, c, g or t
  modified_base (1741157)..(1741213): a, c, g or t
  modified_base (1741240)..(1741240): a, c, g or t
  modified_base (1741254)..(1741257): a, c, g or t
  modified_base (1741262)..(1741265): a, c, g or t
  modified_base (1742333)..(1742334): a, c, g or t
  modified_base (1742457)..(1742472): a, c, g or t
  modified_base (1742479)..(1742480): a, c, g or t
  modified_base (1742515)..(1742528): a, c, g or t
  modified_base (1742535)..(1742536): a, c, g or t
  modified_base (1742543)..(1742543): a, c, g or t
  modified_base (1742548)..(1742551): a, c, g or t
  modified_base (1742782)..(1742794): a, c, g or t
  modified_base (1742816)..(1742820): a, c, g or t
  modified_base (1742921)..(1742968): a, c, g or t
  modified_base (1742986)..(1742987): a, c, g or t
  modified_base (1743043)..(1743043): a, c, g or t
  modified_base (1744467)..(1744468): a, c, g or t
  modified_base (1744503)..(1744504): a, c, g or t
  modified_base (1744509)..(1744510): a, c, g or t
  modified_base (1744545)..(1744545): a, c, g or t
  modified_base (1744550)..(1744551): a, c, g or t
  modified_base (1744590)..(1744598): a, c, g or t
  modified_base (1744750)..(1744751): a, c, g or t
  modified_base (1744759)..(1744769): a, c, g or t
  modified_base (1744778)..(1744779): a, c, g or t
  modified_base (1744934)..(1744936): a, c, g or t
  modified_base (1744965)..(1744978): a, c, g or t
  modified_base (1744985)..(1744986): a, c, g or t
  modified_base (1745043)..(1745060): a, c, g or t
  modified_base (1745084)..(1745084): a, c, g or t
  modified_base (1745133)..(1745152): a, c, g or t
  modified_base (1745440)..(1745441): a, c, g or t
  modified_base (1745512)..(1745514): a, c, g or t
  modified_base (1745516)..(1745522): a, c, g or t
  modified_base (1745524)..(1745525): a, c, g or t
  modified_base (1745561)..(1745572): a, c, g or t
  modified_base (1745923)..(1745923): a, c, g or t
  modified_base (1745942)..(1745943): a, c, g or t
  modified_base (1746578)..(1746586): a, c, g or t
  modified_base (1746591)..(1746592): a, c, g or t
  modified_base (1746607)..(1746646): a, c, g or t
  modified_base (1746662)..(1746665): a, c, g or t
  modified_base (1746668)..(1746668): a, c, g or t
  modified_base (1746670)..(1746671): a, c, g or t
  modified_base (1746683)..(1746684): a, c, g or t
  modified_base (1746693)..(1746761): a, c, g or t
  modified_base (1746763)..(1746764): a, c, g or t
  modified_base (1746767)..(1746768): a, c, g or t
  modified_base (1746772)..(1746773): a, c, g or t
  modified_base (1746844)..(1746845): a, c, g or t
  modified_base (1746849)..(1746850): a, c, g or t
  modified_base (1746905)..(1746906): a, c, g or t
  modified_base (1747030)..(1747031): a, c, g or t
  modified_base (1747042)..(1747050): a, c, g or t
  modified_base (1747205)..(1747238): a, c, g or t
  modified_base (1747329)..(1747428): a, c, g or t
  modified_base (1747470)..(1747500): a, c, g or t
  modified_base (1747524)..(1747615): a, c, g or t
  modified_base (1747641)..(1747642): a, c, g or t
  modified_base (1747667)..(1747675): a, c, g or t
  modified_base (1747699)..(1747742): a, c, g or t
  modified_base (1747764)..(1747765): a, c, g or t
  modified_base (1747777)..(1747777): a, c, g or t
  modified_base (1747792)..(1747808): a, c, g or t
  modified_base (1747832)..(1747833): a, c, g or t
  modified_base (1747857)..(1747864): a, c, g or t
  modified_base (1747866)..(1747867): a, c, g or t
  modified_base (1747897)..(1747900): a, c, g or t
  modified_base (1747904)..(1747905): a, c, g or t
  modified_base (1747944)..(1747945): a, c, g or t
  modified_base (1747947)..(1747948): a, c, g or t
  modified_base (1747954)..(1747978): a, c, g or t
  modified_base (1748023)..(1748024): a, c, g or t
  modified_base (1748027)..(1748028): a, c, g or t
  modified_base (1748065)..(1748075): a, c, g or t
  modified_base (1748077)..(1748078): a, c, g or t
  modified_base (1748087)..(1748088): a, c, g or t
  modified_base (1748124)..(1748125): a, c, g or t
  modified_base (1748128)..(1748149): a, c, g or t
  modified_base (1748194)..(1748222): a, c, g or t
  modified_base (1748226)..(1748227): a, c, g or t
  modified_base (1748233)..(1748234): a, c, g or t
  modified_base (1748281)..(1748285): a, c, g or t
  modified_base (1748302)..(1748311): a, c, g or t
  modified_base (1748353)..(1748397): a, c, g or t
  modified_base (1748417)..(1748418): a, c, g or t
  modified_base (1748420)..(1748424): a, c, g or t
  modified_base (1748447)..(1748450): a, c, g or t
  modified_base (1748452)..(1748493): a, c, g or t
  modified_base (1748516)..(1748531): a, c, g or t
  modified_base (1748543)..(1748543): a, c, g or t
  modified_base (1748551)..(1748597): a, c, g or t
  modified_base (1748609)..(1748610): a, c, g or t
  modified_base (1748617)..(1748821): a, c, g or t
  modified_base (1748841)..(1748960): a, c, g or t
  modified_base (1749006)..(1749045): a, c, g or t
  modified_base (1749065)..(1749065): a, c, g or t
  modified_base (1749073)..(1749116): a, c, g or t
  modified_base (1749129)..(1749133): a, c, g or t
  modified_base (1749139)..(1749178): a, c, g or t
  modified_base (1749238)..(1749238): a, c, g or t
  modified_base (1749262)..(1749262): a, c, g or t
  modified_base (1749292)..(1749624): a, c, g or t
  modified_base (1749626)..(1749626): a, c, g or t
  modified_base (1749638)..(1749638): a, c, g or t
  modified_base (1749647)..(1749758): a, c, g or t
  modified_base (1749779)..(1749884): a, c, g or t
  modified_base (1749899)..(1749899): a, c, g or t
  modified_base (1749902)..(1749902): a, c, g or t
  modified_base (1749914)..(1749914): a, c, g or t
  modified_base (1749953)..(1749995): a, c, g or t
  modified_base (1750018)..(1750058): a, c, g or t
  modified_base (1751114)..(1751115): a, c, g or t
  modified_base (1751120)..(1751121): a, c, g or t
  modified_base (1751871)..(1751899): a, c, g or t
  modified_base (1753723)..(1753723): a, c, g or t
  modified_base (1753823)..(1753823): a, c, g or t
  modified_base (1756231)..(1756232): a, c, g or t
  modified_base (1758435)..(1758440): a, c, g or t
  modified_base (1759960)..(1759971): a, c, g or t
  modified_base (1761443)..(1761443): a, c, g or t
  modified_base (1761504)..(1761507): a, c, g or t
  modified_base (1762415)..(1762418): a, c, g or t
  modified_base (1762496)..(1762496): a, c, g or t
  modified_base (1762548)..(1762548): a, c, g or t
  modified_base (1770520)..(1770520): a, c, g or t
  modified_base (1771506)..(1771509): a, c, g or t
  modified_base (1772684)..(1772684): a, c, g or t
  modified_base (1775665)..(1775665): a, c, g or t
  modified_base (1777211)..(1777211): a, c, g or t
  modified_base (1778448)..(1778448): a, c, g or t
  modified_base (1778474)..(1778474): a, c, g or t
  modified_base (1778708)..(1778708): a, c, g or t
  modified_base (1780570)..(1780571): a, c, g or t
  modified_base (1785668)..(1785668): a, c, g or t
  modified_base (1787149)..(1787149): a, c, g or t
  modified_base (1787153)..(1787156): a, c, g or t
  modified_base (1788861)..(1788861): a, c, g or t
  modified_base (1790320)..(1790320): a, c, g or t
  modified_base (1791784)..(1791788): a, c, g or t
  modified_base (1793265)..(1793265): a, c, g or t
  modified_base (1795305)..(1795305): a, c, g or t
  modified_base (1796078)..(1796082): a, c, g or t
  modified_base (1797138)..(1797138): a, c, g or t
  modified_base (1798179)..(1798179): a, c, g or t
  modified_base (1799564)..(1799564): a, c, g or t
  modified_base (1800663)..(1800663): a, c, g or t
  modified_base (1801061)..(1801064): a, c, g or t
  modified_base (1801384)..(1801389): a, c, g or t
  modified_base (1802481)..(1802481): a, c, g or t
  modified_base (1803077)..(1803077): a, c, g or t
  modified_base (1803299)..(1803299): a, c, g or t
  modified_base (1803504)..(1803504): a, c, g or t
  modified_base (1804236)..(1804236): a, c, g or t
  modified_base (1804263)..(1804263): a, c, g or t
  modified_base (1804949)..(1804949): a, c, g or t
  modified_base (1806612)..(1806612): a, c, g or t
  modified_base (1806798)..(1806801): a, c, g or t
  modified_base (1808311)..(1808312): a, c, g or t
  modified_base (1808649)..(1808649): a, c, g or t
  modified_base (1808693)..(1808693): a, c, g or t
  modified_base (1808844)..(1808856): a, c, g or t
  modified_base (1811152)..(1811152): a, c, g or t
  modified_base (1811613)..(1811627): a, c, g or t
  modified_base (1813382)..(1813382): a, c, g or t
  modified_base (1814805)..(1814805): a, c, g or t
  modified_base (1815824)..(1815827): a, c, g or t
  modified_base (1818434)..(1818435): a, c, g or t
  modified_base (1819630)..(1819630): a, c, g or t
  modified_base (1820185)..(1820185): a, c, g or t
  modified_base (1823073)..(1823076): a, c, g or t
  modified_base (1823155)..(1823155): a, c, g or t
  modified_base (1824453)..(1824453): a, c, g or t
  modified_base (1824515)..(1824515): a, c, g or t
  modified_base (1825126)..(1825126): a, c, g or t
  modified_base (1825417)..(1825426): a, c, g or t
  modified_base (1826311)..(1826311): a, c, g or t
  modified_base (1827543)..(1827543): a, c, g or t
  modified_base (1828933)..(1828936): a, c, g or t
  modified_base (1831571)..(1831574): a, c, g or t
  modified_base (1832122)..(1832124): a, c, g or t
  modified_base (1832838)..(1832838): a, c, g or t
  modified_base (1833855)..(1833855): a, c, g or t
  modified_base (1834035)..(1834037): a, c, g or t
  modified_base (1834064)..(1834067): a, c, g or t
  modified_base (1835485)..(1835486): a, c, g or t
  modified_base (1842814)..(1842814): a, c, g or t
  modified_base (1849436)..(1849436): a, c, g or t
  modified_base (1849546)..(1849551): a, c, g or t
  modified_base (1850015)..(1850020): a, c, g or t
  modified_base (1850343)..(1850343): a, c, g or t
  modified_base (1851329)..(1851329): a, c, g or t
  modified_base (1851379)..(1851382): a, c, g or t
  modified_base (1852962)..(1852962): a, c, g or t
  modified_base (1853342)..(1853342): a, c, g or t
  modified_base (1854049)..(1854049): a, c, g or t
  modified_base (1854929)..(1854929): a, c, g or t
  modified_base (1857199)..(1857199): a, c, g or t
  modified_base (1858480)..(1858519): a, c, g or t
  modified_base (1858943)..(1858946): a, c, g or t
  modified_base (1861350)..(1861351): a, c, g or t
  modified_base (1861375)..(1861375): a, c, g or t
  modified_base (1862258)..(1862259): a, c, g or t
  modified_base (1862263)..(1862264): a, c, g or t
  modified_base (1862271)..(1862288): a, c, g or t
  modified_base (1862967)..(1862967): a, c, g or t
  modified_base (1863018)..(1863018): a, c, g or t
  modified_base (1863029)..(1863029): a, c, g or t
  modified_base (1863233)..(1863233): a, c, g or t
  modified_base (1863405)..(1863405): a, c, g or t
  modified_base (1863519)..(1863521): a, c, g or t
  modified_base (1863549)..(1863554): a, c, g or t
  modified_base (1863559)..(1863559): a, c, g or t
  modified_base (1863587)..(1863626): a, c, g or t
  modified_base (1863719)..(1863767): a, c, g or t
  modified_base (1863851)..(1863891): a, c, g or t
  modified_base (1863915)..(1863920): a, c, g or t
  modified_base (1863932)..(1863971): a, c, g or t
  modified_base (1864060)..(1864060): a, c, g or t
  modified_base (1864156)..(1864195): a, c, g or t
  modified_base (1864223)..(1864228): a, c, g or t
  modified_base (1864234)..(1864238): a, c, g or t
  modified_base (1864269)..(1864331): a, c, g or t
  modified_base (1864341)..(1864341): a, c, g or t
  modified_base (1864405)..(1864451): a, c, g or t
  modified_base (1864473)..(1864631): a, c, g or t
  modified_base (1864655)..(1864677): a, c, g or t
  modified_base (1864692)..(1864695): a, c, g or t
  modified_base (1864701)..(1864725): a, c, g or t
  modified_base (1864752)..(1864792): a, c, g or t
  modified_base (1864795)..(1864796): a, c, g or t
  modified_base (1864921)..(1864921): a, c, g or t
  modified_base (1864927)..(1864928): a, c, g or t
  modified_base (1864933)..(1864934): a, c, g or t
  modified_base (1864970)..(1865016): a, c, g or t
  modified_base (1865028)..(1865029): a, c, g or t
  modified_base (1865040)..(1865043): a, c, g or t
  modified_base (1865066)..(1865067): a, c, g or t
  modified_base (1865093)..(1865132): a, c, g or t
  modified_base (1865170)..(1865170): a, c, g or t
  modified_base (1865172)..(1865210): a, c, g or t
  modified_base (1865298)..(1865348): a, c, g or t
  modified_base (1865398)..(1865544): a, c, g or t
  modified_base (1865567)..(1865626): a, c, g or t
  modified_base (1865641)..(1865641): a, c, g or t
  modified_base (1865652)..(1865676): a, c, g or t
  modified_base (1865704)..(1865744): a, c, g or t
  modified_base (1865769)..(1865772): a, c, g or t
  modified_base (1865794)..(1865833): a, c, g or t
  modified_base (1865845)..(1865845): a, c, g or t
  modified_base (1865900)..(1865900): a, c, g or t
  modified_base (1865917)..(1865917): a, c, g or t
  modified_base (1865929)..(1865929): a, c, g or t
  modified_base (1865938)..(1865938): a, c, g or t
  modified_base (1865985)..(1865985): a, c, g or t
  modified_base (1866030)..(1866030): a, c, g or t
  modified_base (1866035)..(1866102): a, c, g or t
  modified_base (1866167)..(1866168): a, c, g or t
  modified_base (1866171)..(1866172): a, c, g or t
  modified_base (1866178)..(1866252): a, c, g or t
  modified_base (1866271)..(1866275): a, c, g or t
  modified_base (1866282)..(1866304): a, c, g or t
  modified_base (1866333)..(1866428): a, c, g or t
  modified_base (1866449)..(1866523): a, c, g or t
  modified_base (1866540)..(1866543): a, c, g or t
  modified_base (1866639)..(1866641): a, c, g or t
  modified_base (1866693)..(1866693): a, c, g or t
  modified_base (1866712)..(1866712): a, c, g or t
  modified_base (1866742)..(1866782): a, c, g or t
  modified_base (1866785)..(1866785): a, c, g or t
  modified_base (1866839)..(1866891): a, c, g or t
  modified_base (1866937)..(1866962): a, c, g or t
  modified_base (1866964)..(1866967): a, c, g or t
  modified_base (1866998)..(1866998): a, c, g or t
  modified_base (1867000)..(1867047): a, c, g or t
  modified_base (1867071)..(1867156): a, c, g or t
  modified_base (1867173)..(1867174): a, c, g or t
  modified_base (1867179)..(1867239): a, c, g or t
  modified_base (1867255)..(1867255): a, c, g or t
  modified_base (1867263)..(1867323): a, c, g or t
  modified_base (1867347)..(1867365): a, c, g or t
  modified_base (1867370)..(1867371): a, c, g or t
  modified_base (1867399)..(1867400): a, c, g or t
  modified_base (1867403)..(1867622): a, c, g or t
  modified_base (1867649)..(1867654): a, c, g or t
  modified_base (1867680)..(1867680): a, c, g or t
  modified_base (1867682)..(1867683): a, c, g or t
  modified_base (1867736)..(1867948): a, c, g or t
  modified_base (1867972)..(1868043): a, c, g or t
  modified_base (1868067)..(1868068): a, c, g or t
  modified_base (1868100)..(1868174): a, c, g or t
  modified_base (1868186)..(1868187): a, c, g or t
  modified_base (1868204)..(1868205): a, c, g or t
  modified_base (1868211)..(1868319): a, c, g or t
  modified_base (1868342)..(1868385): a, c, g or t
  modified_base (1868407)..(1868407): a, c, g or t
  modified_base (1868433)..(1868511): a, c, g or t
  modified_base (1868532)..(1868590): a, c, g or t
  modified_base (1868635)..(1869460): a, c, g or t
  modified_base (1869494)..(1869495): a, c, g or t
  modified_base (1869500)..(1869559): a, c, g or t
  modified_base (1869581)..(1869582): a, c, g or t
  modified_base (1869586)..(1869587): a, c, g or t
  modified_base (1869590)..(1869590): a, c, g or t
  modified_base (1869596)..(1869596): a, c, g or t
  modified_base (1869606)..(1869674): a, c, g or t
  modified_base (1869979)..(1869980): a, c, g or t
  modified_base (1870059)..(1870059): a, c, g or t
  modified_base (1870073)..(1870075): a, c, g or t
  modified_base (1870077)..(1870080): a, c, g or t
  modified_base (1870083)..(1870084): a, c, g or t
  modified_base (1870266)..(1870266): a, c, g or t
  modified_base (1870554)..(1870554): a, c, g or t
  modified_base (1871221)..(1871223): a, c, g or t
  modified_base (1871566)..(1871567): a, c, g or t
  modified_base (1871574)..(1871581): a, c, g or t
  modified_base (1873259)..(1873260): a, c, g or t
  modified_base (1873264)..(1873265): a, c, g or t
  modified_base (1873611)..(1873649): a, c, g or t
  modified_base (1875372)..(1875409): a, c, g or t
  modified_base (1875462)..(1875471): a, c, g or t
  modified_base (1875587)..(1875588): a, c, g or t
  modified_base (1875676)..(1875722): a, c, g or t
  modified_base (1875801)..(1875842): a, c, g or t
  modified_base (1875864)..(1875880): a, c, g or t
  modified_base (1875904)..(1875993): a, c, g or t
  modified_base (1876020)..(1876033): a, c, g or t
  modified_base (1876035)..(1876036): a, c, g or t
  modified_base (1876044)..(1876045): a, c, g or t
  modified_base (1876057)..(1876061): a, c, g or t
  modified_base (1876092)..(1876095): a, c, g or t
  modified_base (1876107)..(1876108): a, c, g or t
  modified_base (1876121)..(1876122): a, c, g or t
  modified_base (1876125)..(1876126): a, c, g or t
  modified_base (1876128)..(1876129): a, c, g or t
  modified_base (1876197)..(1876237): a, c, g or t
  modified_base (1876325)..(1876328): a, c, g or t
  modified_base (1876330)..(1876331): a, c, g or t
  modified_base (1876355)..(1876359): a, c, g or t
  modified_base (1876430)..(1876431): a, c, g or t
  modified_base (1876443)..(1876474): a, c, g or t
  modified_base (1876630)..(1876648): a, c, g or t
  modified_base (1876702)..(1876702): a, c, g or t
  modified_base (1876737)..(1876738): a, c, g or t
  modified_base (1876744)..(1876750): a, c, g or t
  modified_base (1876753)..(1876757): a, c, g or t
  modified_base (1876759)..(1876760): a, c, g or t
  modified_base (1876771)..(1876817): a, c, g or t
  modified_base (1876853)..(1876874): a, c, g or t
  modified_base (1876935)..(1876936): a, c, g or t
  modified_base (1876938)..(1876939): a, c, g or t
  modified_base (1876951)..(1876980): a, c, g or t
  modified_base (1876991)..(1876992): a, c, g or t
  modified_base (1877018)..(1877018): a, c, g or t
  modified_base (1877034)..(1877035): a, c, g or t
  modified_base (1877042)..(1877042): a, c, g or t
  modified_base (1877049)..(1877050): a, c, g or t
  modified_base (1877052)..(1877070): a, c, g or t
  modified_base (1877091)..(1877092): a, c, g or t
  modified_base (1877094)..(1877113): a, c, g or t
  modified_base (1877129)..(1877130): a, c, g or t
  modified_base (1877134)..(1877135): a, c, g or t
  modified_base (1877137)..(1877161): a, c, g or t
  modified_base (1877172)..(1877173): a, c, g or t
  modified_base (1877186)..(1877186): a, c, g or t
  modified_base (1877266)..(1877269): a, c, g or t
  modified_base (1877319)..(1877320): a, c, g or t
  modified_base (1877332)..(1877333): a, c, g or t
  modified_base (1877393)..(1877409): a, c, g or t
  modified_base (1877412)..(1877415): a, c, g or t
  modified_base (1877441)..(1877467): a, c, g or t
  modified_base (1877762)..(1877763): a, c, g or t
  modified_base (1877869)..(1877878): a, c, g or t
  modified_base (1877881)..(1877882): a, c, g or t
  modified_base (1877894)..(1877895): a, c, g or t
  modified_base (1877927)..(1877928): a, c, g or t
  modified_base (1877992)..(1877993): a, c, g or t
  modified_base (1878044)..(1878045): a, c, g or t
  modified_base (1878047)..(1878085): a, c, g or t
  modified_base (1878096)..(1878097): a, c, g or t
  modified_base (1878109)..(1878120): a, c, g or t
  modified_base (1878129)..(1878130): a, c, g or t
  modified_base (1878136)..(1878137): a, c, g or t
  modified_base (1878146)..(1878179): a, c, g or t
  modified_base (1878325)..(1878326): a, c, g or t
  modified_base (1878328)..(1878338): a, c, g or t
  modified_base (1878341)..(1878342): a, c, g or t
  modified_base (1878366)..(1878411): a, c, g or t
  modified_base (1878428)..(1878429): a, c, g or t
  modified_base (1878436)..(1878437): a, c, g or t
  modified_base (1878439)..(1878440): a, c, g or t
  modified_base (1878444)..(1878445): a, c, g or t
  modified_base (1878502)..(1878517): a, c, g or t
  modified_base (1878541)..(1878554): a, c, g or t
  modified_base (1878582)..(1878689): a, c, g or t
  modified_base (1878693)..(1878694): a, c, g or t
  modified_base (1878713)..(1878724): a, c, g or t
  modified_base (1878727)..(1878727): a, c, g or t
  modified_base (1878790)..(1878795): a, c, g or t
  modified_base (1878874)..(1878874): a, c, g or t
  modified_base (1878917)..(1878917): a, c, g or t
  modified_base (1879077)..(1879087): a, c, g or t
  modified_base (1879097)..(1879098): a, c, g or t
  modified_base (1879185)..(1879189): a, c, g or t
  modified_base (1879253)..(1879253): a, c, g or t
  modified_base (1879350)..(1879376): a, c, g or t
  modified_base (1879459)..(1879460): a, c, g or t
  modified_base (1879560)..(1879572): a, c, g or t
  modified_base (1879577)..(1879579): a, c, g or t
  modified_base (1879596)..(1879599): a, c, g or t
  modified_base (1879729)..(1879748): a, c, g or t
  modified_base (1879861)..(1879861): a, c, g or t
  modified_base (1879931)..(1879995): a, c, g or t
  modified_base (1880040)..(1880085): a, c, g or t
  modified_base (1880161)..(1880161): a, c, g or t
  modified_base (1880193)..(1880235): a, c, g or t
  modified_base (1880362)..(1880429): a, c, g or t
  modified_base (1880558)..(1880620): a, c, g or t
  modified_base (1880638)..(1880638): a, c, g or t
  modified_base (1880646)..(1880649): a, c, g or t
  modified_base (1880691)..(1880730): a, c, g or t
  modified_base (1880755)..(1880757): a, c, g or t
  modified_base (1880787)..(1880788): a, c, g or t
  modified_base (1880805)..(1880805): a, c, g or t
  modified_base (1880809)..(1880810): a, c, g or t
  modified_base (1880812)..(1880913): a, c, g or t
  modified_base (1880939)..(1880991): a, c, g or t
  modified_base (1880994)..(1880995): a, c, g or t
  modified_base (1881020)..(1881020): a, c, g or t
  modified_base (1881106)..(1881107): a, c, g or t
  modified_base (1881111)..(1881114): a, c, g or t
  modified_base (1881117)..(1881118): a, c, g or t
  modified_base (1881121)..(1881148): a, c, g or t
  modified_base (1881152)..(1881152): a, c, g or t
  modified_base (1881182)..(1881194): a, c, g or t
  modified_base (1881246)..(1881252): a, c, g or t
  modified_base (1881300)..(1881353): a, c, g or t
  modified_base (1881379)..(1881380): a, c, g or t
  modified_base (1881383)..(1881482): a, c, g or t
  modified_base (1881531)..(1881569): a, c, g or t
  modified_base (1881587)..(1881588): a, c, g or t
  modified_base (1881615)..(1881617): a, c, g or t
  modified_base (1881650)..(1881693): a, c, g or t
  modified_base (1881695)..(1881700): a, c, g or t
  modified_base (1881755)..(1881800): a, c, g or t
  modified_base (1881811)..(1881811): a, c, g or t
  modified_base (1881823)..(1881823): a, c, g or t
  modified_base (1881832)..(1881852): a, c, g or t
  modified_base (1881862)..(1881862): a, c, g or t
  modified_base (1881903)..(1881908): a, c, g or t
  modified_base (1881916)..(1881916): a, c, g or t
  modified_base (1881937)..(1881939): a, c, g or t
  modified_base (1882020)..(1882023): a, c, g or t
  modified_base (1882047)..(1882050): a, c, g or t
  modified_base (1882141)..(1882161): a, c, g or t
  modified_base (1882267)..(1882320): a, c, g or t
  modified_base (1882326)..(1882327): a, c, g or t
  modified_base (1882331)..(1882334): a, c, g or t
  modified_base (1882336)..(1882339): a, c, g or t
  modified_base (1882341)..(1882342): a, c, g or t
  modified_base (1882344)..(1882393): a, c, g or t
  modified_base (1882418)..(1882467): a, c, g or t
  modified_base (1882522)..(1882524): a, c, g or t
  modified_base (1882548)..(1882548): a, c, g or t
  modified_base (1882558)..(1882578): a, c, g or t
  modified_base (1882585)..(1882588): a, c, g or t
  modified_base (1882602)..(1882624): a, c, g or t
  modified_base (1882649)..(1882652): a, c, g or t
  modified_base (1882654)..(1882654): a, c, g or t
  modified_base (1882692)..(1882692): a, c, g or t
  modified_base (1882698)..(1882698): a, c, g or t
  modified_base (1882740)..(1882740): a, c, g or t
  modified_base (1882764)..(1882764): a, c, g or t
  modified_base (1882768)..(1882831): a, c, g or t
  modified_base (1882834)..(1882834): a, c, g or t
  modified_base (1882877)..(1882882): a, c, g or t
  modified_base (1882885)..(1882886): a, c, g or t
  modified_base (1882944)..(1882985): a, c, g or t
  modified_base (1883032)..(1883077): a, c, g or t
  modified_base (1883108)..(1883108): a, c, g or t
  modified_base (1883110)..(1883160): a, c, g or t
  modified_base (1883203)..(1883204): a, c, g or t
  modified_base (1883230)..(1883265): a, c, g or t
  modified_base (1883332)..(1883359): a, c, g or t
  modified_base (1883383)..(1883448): a, c, g or t
  modified_base (1883450)..(1883451): a, c, g or t
  modified_base (1883455)..(1883456): a, c, g or t
  modified_base (1883475)..(1883475): a, c, g or t
  modified_base (1883509)..(1883512): a, c, g or t
  modified_base (1883526)..(1883527): a, c, g or t
  modified_base (1883533)..(1883601): a, c, g or t
  modified_base (1883619)..(1883619): a, c, g or t
  modified_base (1883622)..(1883622): a, c, g or t
  modified_base (1883624)..(1883668): a, c, g or t
  modified_base (1883694)..(1883717): a, c, g or t
  modified_base (1883720)..(1883721): a, c, g or t
  modified_base (1883733)..(1883734): a, c, g or t
  modified_base (1883741)..(1883742): a, c, g or t
  modified_base (1883758)..(1883825): a, c, g or t
  modified_base (1883859)..(1883860): a, c, g or t
  modified_base (1883871)..(1883888): a, c, g or t
  modified_base (1883922)..(1883923): a, c, g or t
  modified_base (1883929)..(1883971): a, c, g or t
  modified_base (1884060)..(1884061): a, c, g or t
  modified_base (1884067)..(1884118): a, c, g or t
  modified_base (1884150)..(1884254): a, c, g or t
  modified_base (1884301)..(1884302): a, c, g or t
  modified_base (1884312)..(1884313): a, c, g or t
  modified_base (1884338)..(1884342): a, c, g or t
  modified_base (1884448)..(1884510): a, c, g or t
  modified_base (1884512)..(1884513): a, c, g or t
  modified_base (1884530)..(1884545): a, c, g or t
  modified_base (1884549)..(1884551): a, c, g or t
  modified_base (1884645)..(1884754): a, c, g or t
  modified_base (1884756)..(1884756): a, c, g or t
  modified_base (1884776)..(1885045): a, c, g or t
  modified_base (1885049)..(1885050): a, c, g or t
  modified_base (1885072)..(1885084): a, c, g or t
  modified_base (1885124)..(1885174): a, c, g or t
  modified_base (1885197)..(1885213): a, c, g or t
  modified_base (1885235)..(1885236): a, c, g or t
  modified_base (1885238)..(1885242): a, c, g or t
  modified_base (1885256)..(1885257): a, c, g or t
  modified_base (1885261)..(1885262): a, c, g or t
  modified_base (1885266)..(1885328): a, c, g or t
  modified_base (1885358)..(1885461): a, c, g or t
  modified_base (1885485)..(1885504): a, c, g or t
  modified_base (1885543)..(1885544): a, c, g or t
  modified_base (1885547)..(1885548): a, c, g or t
  modified_base (1885560)..(1885609): a, c, g or t
  modified_base (1885634)..(1885677): a, c, g or t
  modified_base (1885842)..(1885843): a, c, g or t
  modified_base (1886801)..(1886803): a, c, g or t
  modified_base (1886806)..(1886807): a, c, g or t
  modified_base (1886827)..(1886830): a, c, g or t
  modified_base (1887490)..(1887491): a, c, g or t
  modified_base (1887690)..(1887691): a, c, g or t
  modified_base (1888862)..(1888863): a, c, g or t
  modified_base (1888869)..(1888875): a, c, g or t
  modified_base (1888877)..(1888878): a, c, g or t
  modified_base (1892916)..(1892916): a, c, g or t
  modified_base (1892987)..(1892988): a, c, g or t
  modified_base (1893061)..(1893067): a, c, g or t
  modified_base (1893966)..(1893966): a, c, g or t
  modified_base (1894832)..(1894833): a, c, g or t
  modified_base (1895610)..(1895610): a, c, g or t
  modified_base (1896471)..(1896472): a, c, g or t
  modified_base (1896474)..(1896475): a, c, g or t
  modified_base (1896745)..(1896746): a, c, g or t
  modified_base (1896815)..(1896816): a, c, g or t
  modified_base (1898355)..(1898355): a, c, g or t
  modified_base (1898419)..(1898420): a, c, g or t
  modified_base (1898479)..(1898510): a, c, g or t
  modified_base (1898514)..(1898514): a, c, g or t
  modified_base (1898523)..(1898523): a, c, g or t
  modified_base (1898578)..(1898578): a, c, g or t
  modified_base (1898713)..(1898713): a, c, g or t
  modified_base (1898747)..(1898747): a, c, g or t
  modified_base (1898772)..(1898813): a, c, g or t
  modified_base (1898817)..(1898817): a, c, g or t
  modified_base (1898870)..(1898915): a, c, g or t
  modified_base (1898940)..(1898943): a, c, g or t
  modified_base (1898962)..(1898963): a, c, g or t
  modified_base (1898965)..(1899004): a, c, g or t
  modified_base (1899140)..(1899141): a, c, g or t
  modified_base (1899145)..(1899200): a, c, g or t
  modified_base (1899458)..(1899500): a, c, g or t
  modified_base (1899560)..(1899562): a, c, g or t
  modified_base (1899564)..(1899606): a, c, g or t
  modified_base (1899651)..(1899705): a, c, g or t
  modified_base (1899737)..(1899737): a, c, g or t
  modified_base (1899740)..(1899740): a, c, g or t
  modified_base (1899746)..(1899746): a, c, g or t
  modified_base (1899748)..(1899788): a, c, g or t
  modified_base (1899790)..(1899791): a, c, g or t
  modified_base (1899813)..(1899853): a, c, g or t
  modified_base (1899855)..(1899856): a, c, g or t
  modified_base (1899894)..(1899898): a, c, g or t
  modified_base (1899901)..(1899956): a, c, g or t
  modified_base (1899980)..(1900019): a, c, g or t
  modified_base (1900046)..(1900091): a, c, g or t
  modified_base (1900146)..(1900146): a, c, g or t
  modified_base (1900154)..(1900156): a, c, g or t
  modified_base (1900162)..(1900162): a, c, g or t
  modified_base (1900197)..(1900197): a, c, g or t
  modified_base (1900223)..(1900223): a, c, g or t
  modified_base (1900288)..(1900297): a, c, g or t
  modified_base (1900347)..(1900350): a, c, g or t
  modified_base (1900420)..(1900462): a, c, g or t
  modified_base (1900569)..(1900569): a, c, g or t
  modified_base (1900620)..(1900621): a, c, g or t
  modified_base (1900686)..(1900687): a, c, g or t
  modified_base (1900691)..(1900691): a, c, g or t
  modified_base (1900695)..(1900696): a, c, g or t
  modified_base (1900707)..(1900707): a, c, g or t
  modified_base (1900759)..(1900760): a, c, g or t
  modified_base (1900762)..(1900805): a, c, g or t
  modified_base (1900807)..(1900808): a, c, g or t
  modified_base (1900836)..(1900837): a, c, g or t
  modified_base (1900891)..(1900891): a, c, g or t
  modified_base (1900893)..(1900947): a, c, g or t
  modified_base (1901012)..(1901057): a, c, g or t
  modified_base (1901090)..(1901156): a, c, g or t
  modified_base (1901216)..(1901259): a, c, g or t
  modified_base (1901267)..(1901268): a, c, g or t
  modified_base (1901276)..(1901277): a, c, g or t
  modified_base (1901301)..(1901346): a, c, g or t
  modified_base (1901350)..(1901351): a, c, g or t
  modified_base (1901357)..(1901358): a, c, g or t
  modified_base (1901388)..(1901388): a, c, g or t
  modified_base (1901475)..(1901478): a, c, g or t
  modified_base (1901481)..(1901527): a, c, g or t
  modified_base (1901546)..(1901583): a, c, g or t
  modified_base (1901604)..(1901655): a, c, g or t
  modified_base (1901683)..(1901690): a, c, g or t
  modified_base (1901698)..(1901698): a, c, g or t
  modified_base (1901714)..(1901731): a, c, g or t
  modified_base (1901771)..(1901772): a, c, g or t
  modified_base (1901776)..(1901776): a, c, g or t
  modified_base (1901783)..(1901825): a, c, g or t
  modified_base (1901846)..(1901861): a, c, g or t
  modified_base (1901892)..(1901950): a, c, g or t
  modified_base (1901986)..(1901987): a, c, g or t
  modified_base (1901989)..(1901990): a, c, g or t
  modified_base (1901994)..(1901995): a, c, g or t
  modified_base (1901997)..(1902011): a, c, g or t
  modified_base (1902042)..(1902043): a, c, g or t
  modified_base (1902059)..(1902060): a, c, g or t
  modified_base (1902064)..(1902086): a, c, g or t
  modified_base (1902109)..(1902114): a, c, g or t
  modified_base (1902139)..(1902152): a, c, g or t
  modified_base (1902186)..(1902186): a, c, g or t
  modified_base (1902189)..(1902192): a, c, g or t
  modified_base (1902226)..(1902227): a, c, g or t
  modified_base (1902267)..(1902270): a, c, g or t
  modified_base (1902274)..(1902276): a, c, g or t
  modified_base (1902299)..(1902338): a, c, g or t
  modified_base (1902363)..(1902363): a, c, g or t
  modified_base (1902372)..(1902382): a, c, g or t
  modified_base (1902423)..(1902485): a, c, g or t
  modified_base (1902639)..(1902727): a, c, g or t
  modified_base (1902729)..(1902732): a, c, g or t
  modified_base (1902752)..(1902752): a, c, g or t
  modified_base (1902758)..(1903198): a, c, g or t
  modified_base (1903206)..(1903206): a, c, g or t
  modified_base (1903216)..(1903217): a, c, g or t
  modified_base (1903222)..(1903238): a, c, g or t
  modified_base (1903249)..(1903249): a, c, g or t
  modified_base (1903275)..(1903342): a, c, g or t
  modified_base (1903376)..(1903382): a, c, g or t
  modified_base (1903413)..(1903425): a, c, g or t
  modified_base (1903436)..(1903437): a, c, g or t
  modified_base (1903469)..(1903470): a, c, g or t
  modified_base (1903474)..(1903477): a, c, g or t
  modified_base (1903501)..(1903545): a, c, g or t
  modified_base (1903558)..(1903559): a, c, g or t
  modified_base (1903563)..(1903564): a, c, g or t
  modified_base (1903569)..(1903587): a, c, g or t
  modified_base (1903617)..(1903618): a, c, g or t
  modified_base (1903622)..(1903694): a, c, g or t
  modified_base (1903703)..(1903703): a, c, g or t
  modified_base (1903723)..(1903929): a, c, g or t
  modified_base (1903967)..(1904008): a, c, g or t
  modified_base (1904029)..(1904066): a, c, g or t
  modified_base (1904103)..(1904106): a, c, g or t
  modified_base (1904112)..(1904128): a, c, g or t
  modified_base (1904131)..(1904133): a, c, g or t
  modified_base (1904138)..(1904139): a, c, g or t
  modified_base (1904152)..(1904194): a, c, g or t
  modified_base (1904234)..(1904238): a, c, g or t
  modified_base (1904257)..(1904257): a, c, g or t
  modified_base (1904259)..(1905326): a, c, g or t
  modified_base (1905360)..(1905950): a, c, g or t
  modified_base (1905965)..(1905965): a, c, g or t
  modified_base (1905969)..(1905971): a, c, g or t
  modified_base (1905974)..(1906386): a, c, g or t
  modified_base (1906389)..(1906390): a, c, g or t
  modified_base (1906410)..(1906625): a, c, g or t
  modified_base (1906648)..(1906687): a, c, g or t
  modified_base (1906689)..(1906690): a, c, g or t
  modified_base (1906714)..(1906755): a, c, g or t
  modified_base (1906841)..(1906938): a, c, g or t
  modified_base (1906976)..(1907024): a, c, g or t
  modified_base (1907966)..(1907966): a, c, g or t
  modified_base (1907968)..(1907969): a, c, g or t
  modified_base (1908152)..(1908156): a, c, g or t
  modified_base (1908288)..(1908556): a, c, g or t
  modified_base (1908583)..(1908638): a, c, g or t
  modified_base (1908709)..(1908722): a, c, g or t
  modified_base (1908772)..(1908773): a, c, g or t
  modified_base (1908847)..(1908893): a, c, g or t
  modified_base (1910200)..(1910200): a, c, g or t
  modified_base (1910202)..(1910203): a, c, g or t
  modified_base (1910207)..(1910207): a, c, g or t
  modified_base (1910435)..(1910436): a, c, g or t
  modified_base (1910440)..(1910441): a, c, g or t
  modified_base (1910443)..(1910448): a, c, g or t
  modified_base (1910519)..(1910519): a, c, g or t
  modified_base (1910653)..(1910653): a, c, g or t
  modified_base (1910870)..(1910870): a, c, g or t
  modified_base (1910877)..(1910878): a, c, g or t
  modified_base (1911157)..(1911157): a, c, g or t
  modified_base (1911212)..(1911212): a, c, g or t
  modified_base (1911219)..(1911219): a, c, g or t
  modified_base (1911426)..(1911478): a, c, g or t
  modified_base (1911540)..(1911542): a, c, g or t
  modified_base (1911547)..(1911579): a, c, g or t
  modified_base (1911582)..(1911583): a, c, g or t
  modified_base (1911635)..(1911651): a, c, g or t
  modified_base (1911657)..(1911657): a, c, g or t
  modified_base (1911677)..(1911678): a, c, g or t
  modified_base (1911682)..(1911691): a, c, g or t
  modified_base (1911711)..(1911711): a, c, g or t
  modified_base (1911796)..(1911796): a, c, g or t
  modified_base (1911798)..(1911835): a, c, g or t
  modified_base (1911864)..(1911864): a, c, g or t
  modified_base (1911874)..(1911913): a, c, g or t
  modified_base (1912005)..(1912005): a, c, g or t
  modified_base (1912023)..(1912023): a, c, g or t
  modified_base (1912032)..(1912050): a, c, g or t
  modified_base (1912065)..(1912065): a, c, g or t
  modified_base (1912316)..(1912355): a, c, g or t
  modified_base (1912581)..(1912633): a, c, g or t
  modified_base (1912658)..(1912666): a, c, g or t
  modified_base (1912713)..(1912713): a, c, g or t
  modified_base (1912965)..(1912972): a, c, g or t
  modified_base (1912981)..(1912982): a, c, g or t
  modified_base (1912984)..(1912985): a, c, g or t
  modified_base (1913019)..(1913153): a, c, g or t
  modified_base (1913205)..(1913208): a, c, g or t
  modified_base (1913211)..(1913216): a, c, g or t
  modified_base (1913224)..(1913224): a, c, g or t
  modified_base (1913233)..(1913233): a, c, g or t
  modified_base (1913240)..(1913335): a, c, g or t
  modified_base (1913381)..(1913381): a, c, g or t
  modified_base (1913384)..(1913384): a, c, g or t
  modified_base (1913402)..(1913402): a, c, g or t
  modified_base (1913408)..(1913408): a, c, g or t
  modified_base (1913413)..(1913416): a, c, g or t
  modified_base (1913643)..(1913651): a, c, g or t
  modified_base (1913712)..(1913714): a, c, g or t
  modified_base (1913729)..(1913732): a, c, g or t
  modified_base (1913752)..(1913754): a, c, g or t
  modified_base (1913760)..(1913824): a, c, g or t
  modified_base (1913826)..(1913827): a, c, g or t
  modified_base (1913831)..(1913832): a, c, g or t
  modified_base (1913836)..(1913837): a, c, g or t
  modified_base (1913848)..(1914118): a, c, g or t
  modified_base (1914147)..(1914148): a, c, g or t
  modified_base (1914150)..(1914150): a, c, g or t
  modified_base (1914155)..(1914212): a, c, g or t
  modified_base (1914216)..(1914217): a, c, g or t
  modified_base (1914262)..(1914306): a, c, g or t
  modified_base (1914370)..(1914412): a, c, g or t
  modified_base (1914549)..(1914580): a, c, g or t
  modified_base (1914582)..(1914588): a, c, g or t
  modified_base (1914685)..(1914724): a, c, g or t
  modified_base (1914765)..(1914808): a, c, g or t
  modified_base (1914905)..(1914955): a, c, g or t
  modified_base (1915027)..(1915027): a, c, g or t
  modified_base (1915044)..(1915097): a, c, g or t
  modified_base (1915122)..(1915122): a, c, g or t
  modified_base (1915131)..(1915193): a, c, g or t
  modified_base (1915249)..(1915249): a, c, g or t
  modified_base (1915257)..(1915257): a, c, g or t
  modified_base (1915271)..(1915272): a, c, g or t
  modified_base (1915274)..(1915275): a, c, g or t
  modified_base (1915314)..(1915314): a, c, g or t
  modified_base (1915326)..(1915326): a, c, g or t
  modified_base (1915336)..(1915395): a, c, g or t
  modified_base (1915571)..(1915610): a, c, g or t
  modified_base (1915668)..(1915671): a, c, g or t
  modified_base (1916391)..(1916393): a, c, g or t
  modified_base (1916741)..(1916744): a, c, g or t
  modified_base (1916800)..(1916803): a, c, g or t
  modified_base (1916807)..(1916812): a, c, g or t
  modified_base (1918374)..(1918396): a, c, g or t
  modified_base (1919970)..(1919970): a, c, g or t
  modified_base (1922079)..(1922079): a, c, g or t
  modified_base (1922773)..(1922773): a, c, g or t
  modified_base (1923278)..(1923278): a, c, g or t
  modified_base (1923294)..(1923294): a, c, g or t
  modified_base (1923688)..(1923691): a, c, g or t
  modified_base (1923693)..(1923693): a, c, g or t
  modified_base (1925034)..(1925034): a, c, g or t
  modified_base (1925158)..(1925158): a, c, g or t
  modified_base (1925509)..(1925509): a, c, g or t
  modified_base (1925519)..(1925519): a, c, g or t
  modified_base (1926135)..(1926135): a, c, g or t
  modified_base (1930797)..(1930797): a, c, g or t
  modified_base (1932065)..(1932065): a, c, g or t
  modified_base (1932069)..(1932069): a, c, g or t
  modified_base (1933146)..(1933146): a, c, g or t
  modified_base (1933894)..(1933897): a, c, g or t
  modified_base (1934142)..(1934142): a, c, g or t
  modified_base (1934929)..(1934929): a, c, g or t
  modified_base (1939745)..(1939745): a, c, g or t
  modified_base (1940003)..(1940003): a, c, g or t
  modified_base (1944609)..(1944612): a, c, g or t
  modified_base (1945791)..(1945791): a, c, g or t
  modified_base (1948308)..(1948308): a, c, g or t
  modified_base (1949533)..(1949542): a, c, g or t
  modified_base (1955568)..(1955571): a, c, g or t
  modified_base (1955740)..(1955740): a, c, g or t
  modified_base (1957359)..(1957360): a, c, g or t
  modified_base (1957781)..(1957781): a, c, g or t
  modified_base (1959244)..(1959244): a, c, g or t
  modified_base (1959979)..(1959979): a, c, g or t
  modified_base (1960483)..(1960483): a, c, g or t
  modified_base (1962389)..(1962393): a, c, g or t
  modified_base (1964609)..(1964620): a, c, g or t
  modified_base (1965941)..(1965949): a, c, g or t
  modified_base (1966522)..(1966522): a, c, g or t
  modified_base (1966535)..(1966535): a, c, g or t
  modified_base (1966575)..(1966575): a, c, g or t
  modified_base (1967687)..(1967687): a, c, g or t
  modified_base (1968902)..(1968902): a, c, g or t
  modified_base (1968982)..(1968983): a, c, g or t
  modified_base (1968988)..(1969035): a, c, g or t
  modified_base (1969044)..(1969045): a, c, g or t
  modified_base (1969061)..(1969061): a, c, g or t
  modified_base (1971407)..(1971415): a, c, g or t
  modified_base (1972009)..(1972009): a, c, g or t
  modified_base (1976023)..(1976023): a, c, g or t
  modified_base (1976368)..(1976368): a, c, g or t
  modified_base (1977460)..(1977463): a, c, g or t
  modified_base (1979314)..(1979314): a, c, g or t
  modified_base (1980140)..(1980140): a, c, g or t
  modified_base (1981161)..(1981161): a, c, g or t
  modified_base (1981167)..(1981167): a, c, g or t
  modified_base (1981171)..(1981172): a, c, g or t
  modified_base (1983043)..(1983050): a, c, g or t
  modified_base (1986727)..(1986727): a, c, g or t
  modified_base (1986911)..(1986911): a, c, g or t
  modified_base (1988760)..(1988765): a, c, g or t
  modified_base (1989803)..(1989806): a, c, g or t
  modified_base (1990709)..(1990712): a, c, g or t
  modified_base (1991331)..(1991336): a, c, g or t
  modified_base (1991518)..(1991518): a, c, g or t
  modified_base (1991650)..(1991665): a, c, g or t
  modified_base (1999423)..(1999423): a, c, g or t
  modified_base (2000437)..(2000437): a, c, g or t
  modified_base (2002908)..(2002908): a, c, g or t
  modified_base (2003541)..(2003552): a, c, g or t
  modified_base (2004758)..(2004758): a, c, g or t
  modified_base (2009811)..(2009811): a, c, g or t
  modified_base (2010088)..(2010088): a, c, g or t
  modified_base (2013727)..(2013728): a, c, g or t
  modified_base (2013730)..(2013737): a, c, g or t
  modified_base (2014997)..(2015005): a, c, g or t
  modified_base (2015013)..(2015014): a, c, g or t
  modified_base (2018574)..(2018574): a, c, g or t
  modified_base (2018659)..(2018659): a, c, g or t
  modified_base (2018867)..(2018867): a, c, g or t
  modified_base (2023451)..(2023451): a, c, g or t
  modified_base (2024979)..(2024979): a, c, g or t
  modified_base (2026344)..(2026344): a, c, g or t
  modified_base (2026715)..(2026718): a, c, g or t
  modified_base (2029903)..(2029903): a, c, g or t
  modified_base (2029905)..(2029905): a, c, g or t
  modified_base (2029907)..(2029910): a, c, g or t
  modified_base (2032385)..(2032388): a, c, g or t
  modified_base (2035316)..(2035316): a, c, g or t
  modified_base (2037024)..(2037024): a, c, g or t
  modified_base (2038331)..(2038331): a, c, g or t
  modified_base (2038434)..(2038437): a, c, g or t
  modified_base (2038920)..(2038928): a, c, g or t
  modified_base (2039676)..(2039677): a, c, g or t
  modified_base (2039684)..(2039684): a, c, g or t
  modified_base (2044254)..(2044254): a, c, g or t
  modified_base (2046544)..(2046544): a, c, g or t
  modified_base (2048030)..(2048030): a, c, g or t
  modified_base (2048032)..(2048033): a, c, g or t
  modified_base (2051293)..(2051293): a, c, g or t
  modified_base (2052035)..(2052035): a, c, g or t
  modified_base (2055437)..(2055437): a, c, g or t
  modified_base (2055458)..(2055458): a, c, g or t
  modified_base (2055831)..(2055831): a, c, g or t
  modified_base (2059352)..(2059352): a, c, g or t
  modified_base (2059907)..(2059907): a, c, g or t
  modified_base (2059910)..(2059910): a, c, g or t
  modified_base (2060096)..(2060096): a, c, g or t
  modified_base (2062080)..(2062084): a, c, g or t
  modified_base (2063403)..(2063403): a, c, g or t
  modified_base (2063973)..(2063973): a, c, g or t
  modified_base (2064779)..(2064779): a, c, g or t
  modified_base (2066138)..(2066138): a, c, g or t
  modified_base (2066468)..(2066476): a, c, g or t
  modified_base (2066478)..(2066478): a, c, g or t
  modified_base (2067699)..(2067699): a, c, g or t
  modified_base (2067719)..(2067719): a, c, g or t
  modified_base (2068557)..(2068557): a, c, g or t
  modified_base (2068560)..(2068560): a, c, g or t
  modified_base (2069151)..(2069151): a, c, g or t
  modified_base (2071494)..(2071494): a, c, g or t
  modified_base (2073284)..(2073284): a, c, g or t
  modified_base (2073355)..(2073358): a, c, g or t
  modified_base (2075930)..(2075930): a, c, g or t
  modified_base (2076369)..(2076369): a, c, g or t
  modified_base (2081054)..(2081054): a, c, g or t
  modified_base (2081251)..(2081251): a, c, g or t
  modified_base (2082102)..(2082102): a, c, g or t
  modified_base (2083340)..(2083341): a, c, g or t
  modified_base (2084084)..(2084084): a, c, g or t
  modified_base (2084149)..(2084149): a, c, g or t
  modified_base (2084342)..(2084342): a, c, g or t
  modified_base (2084606)..(2084606): a, c, g or t
  modified_base (2086932)..(2086932): a, c, g or t
  modified_base (2086942)..(2086942): a, c, g or t
  modified_base (2087806)..(2087811): a, c, g or t
  modified_base (2088359)..(2088359): a, c, g or t
  modified_base (2089458)..(2089458): a, c, g or t
  modified_base (2089587)..(2089587): a, c, g or t
  modified_base (2090696)..(2090700): a, c, g or t
  modified_base (2090742)..(2090742): a, c, g or t
  modified_base (2091649)..(2091649): a, c, g or t
  modified_base (2094334)..(2094334): a, c, g or t
  modified_base (2095507)..(2095507): a, c, g or t
  modified_base (2095578)..(2095578): a, c, g or t
  modified_base (2096591)..(2096591): a, c, g or t
  modified_base (2096709)..(2096712): a, c, g or t
  modified_base (2096890)..(2096891): a, c, g or t
  modified_base (2096893)..(2096903): a, c, g or t
  modified_base (2096908)..(2096908): a, c, g or t
  modified_base (2097012)..(2097012): a, c, g or t
  modified_base (2101172)..(2101172): a, c, g or t
  modified_base (2103737)..(2103737): a, c, g or t
  modified_base (2104737)..(2104737): a, c, g or t
  modified_base (2105664)..(2105664): a, c, g or t
  modified_base (2108892)..(2108892): a, c, g or t
  modified_base (2110162)..(2110162): a, c, g or t
  modified_base (2110602)..(2110602): a, c, g or t
  modified_base (2112134)..(2112134): a, c, g or t
  modified_base (2112164)..(2112164): a, c, g or t
  modified_base (2112214)..(2112214): a, c, g or t
  modified_base (2114321)..(2114326): a, c, g or t
  modified_base (2114362)..(2114362): a, c, g or t
  modified_base (2114702)..(2114703): a, c, g or t
  modified_base (2114706)..(2114712): a, c, g or t
  modified_base (2114811)..(2114812): a, c, g or t
  modified_base (2114823)..(2114954): a, c, g or t
  modified_base (2114959)..(2114959): a, c, g or t
  modified_base (2114996)..(2114997): a, c, g or t
  modified_base (2115027)..(2115028): a, c, g or t
  modified_base (2115061)..(2115096): a, c, g or t
  modified_base (2115098)..(2115099): a, c, g or t
  modified_base (2115712)..(2115717): a, c, g or t
  modified_base (2119382)..(2119382): a, c, g or t
  modified_base (2119846)..(2119846): a, c, g or t
  modified_base (2120341)..(2120342): a, c, g or t
  modified_base (2120347)..(2120352): a, c, g or t
  modified_base (2120354)..(2120355): a, c, g or t
  modified_base (2120736)..(2120740): a, c, g or t
  modified_base (2120899)..(2120900): a, c, g or t
  modified_base (2121777)..(2121777): a, c, g or t
  modified_base (2121964)..(2121967): a, c, g or t
  modified_base (2123638)..(2123643): a, c, g or t
  modified_base (2124069)..(2124069): a, c, g or t
  modified_base (2124123)..(2124123): a, c, g or t
  modified_base (2124336)..(2124336): a, c, g or t
  modified_base (2129186)..(2129186): a, c, g or t
  modified_base (2129786)..(2129789): a, c, g or t
  modified_base (2130807)..(2130807): a, c, g or t
  modified_base (2131544)..(2131549): a, c, g or t
  modified_base (2132117)..(2132117): a, c, g or t
  modified_base (2132147)..(2132147): a, c, g or t
  modified_base (2134318)..(2134320): a, c, g or t
  modified_base (2134553)..(2134560): a, c, g or t
  modified_base (2135962)..(2135962): a, c, g or t
  modified_base (2135995)..(2135995): a, c, g or t
  modified_base (2136511)..(2136524): a, c, g or t
  modified_base (2136527)..(2136527): a, c, g or t
  modified_base (2140633)..(2140633): a, c, g or t
  modified_base (2140690)..(2140690): a, c, g or t
  modified_base (2140693)..(2140693): a, c, g or t
  modified_base (2140943)..(2140943): a, c, g or t
  modified_base (2140977)..(2140977): a, c, g or t
  modified_base (2141554)..(2141558): a, c, g or t
  modified_base (2143325)..(2143325): a, c, g or t
  modified_base (2143601)..(2143601): a, c, g or t
  modified_base (2144414)..(2144414): a, c, g or t
  modified_base (2147332)..(2147337): a, c, g or t
  modified_base (2147339)..(2147341): a, c, g or t
  modified_base (2147976)..(2147980): a, c, g or t
  modified_base (2148303)..(2148303): a, c, g or t
  modified_base (2148477)..(2148477): a, c, g or t
  modified_base (2149841)..(2149841): a, c, g or t
  modified_base (2151535)..(2151535): a, c, g or t
  modified_base (2151589)..(2151592): a, c, g or t
  modified_base (2154321)..(2154321): a, c, g or t
  modified_base (2156144)..(2156144): a, c, g or t
  modified_base (2156147)..(2156156): a, c, g or t
  modified_base (2156160)..(2156160): a, c, g or t
  modified_base (2156163)..(2156163): a, c, g or t
  modified_base (2156562)..(2156562): a, c, g or t
  modified_base (2157923)..(2157923): a, c, g or t
  modified_base (2158164)..(2158164): a, c, g or t
  modified_base (2159069)..(2159069): a, c, g or t
  modified_base (2161121)..(2161121): a, c, g or t
  modified_base (2161179)..(2161179): a, c, g or t
  modified_base (2162418)..(2162421): a, c, g or t
  modified_base (2162454)..(2162454): a, c, g or t
  modified_base (2162525)..(2162528): a, c, g or t
  modified_base (2162531)..(2162531): a, c, g or t
  modified_base (2162534)..(2162544): a, c, g or t
  modified_base (2162854)..(2162854): a, c, g or t
  modified_base (2162933)..(2162933): a, c, g or t
  modified_base (2165297)..(2165297): a, c, g or t
  modified_base (2166706)..(2166706): a, c, g or t
  modified_base (2167524)..(2167524): a, c, g or t
  modified_base (2167580)..(2167580): a, c, g or t
  modified_base (2168833)..(2168833): a, c, g or t
  modified_base (2170269)..(2170269): a, c, g or t
  modified_base (2170643)..(2170643): a, c, g or t
  modified_base (2170649)..(2170649): a, c, g or t
  modified_base (2171637)..(2171637): a, c, g or t
  modified_base (2172230)..(2172230): a, c, g or t
  modified_base (2175366)..(2175367): a, c, g or t
  modified_base (2175370)..(2175371): a, c, g or t
  modified_base (2176248)..(2176248): a, c, g or t
  modified_base (2176611)..(2176615): a, c, g or t
  modified_base (2176753)..(2176753): a, c, g or t
  modified_base (2176926)..(2176926): a, c, g or t
  modified_base (2177955)..(2177955): a, c, g or t
  modified_base (2178735)..(2178735): a, c, g or t
  modified_base (2180395)..(2180395): a, c, g or t
  modified_base (2180650)..(2180653): a, c, g or t
  modified_base (2184448)..(2184448): a, c, g or t
  modified_base (2184985)..(2184985): a, c, g or t
  modified_base (2185924)..(2185929): a, c, g or t
  modified_base (2185964)..(2185964): a, c, g or t
  modified_base (2185995)..(2185995): a, c, g or t
  modified_base (2186028)..(2186028): a, c, g or t
  modified_base (2186031)..(2186031): a, c, g or t
  modified_base (2186039)..(2186039): a, c, g or t
  modified_base (2186095)..(2186095): a, c, g or t
  modified_base (2188556)..(2188556): a, c, g or t
  modified_base (2189102)..(2189102): a, c, g or t
  modified_base (2190201)..(2190201): a, c, g or t
  modified_base (2190461)..(2190461): a, c, g or t
  modified_base (2190528)..(2190528): a, c, g or t
  modified_base (2190559)..(2190559): a, c, g or t
  modified_base (2190865)..(2190865): a, c, g or t
  modified_base (2190884)..(2190884): a, c, g or t
  modified_base (2193277)..(2193277): a, c, g or t
  modified_base (2193324)..(2193324): a, c, g or t
  modified_base (2193369)..(2193369): a, c, g or t
  modified_base (2193412)..(2193412): a, c, g or t
  modified_base (2195749)..(2195749): a, c, g or t
  modified_base (2196857)..(2196862): a, c, g or t
  modified_base (2199014)..(2199014): a, c, g or t
  modified_base (2200903)..(2200903): a, c, g or t
  modified_base (2203490)..(2203490): a, c, g or t
  modified_base (2204742)..(2204743): a, c, g or t
  modified_base (2204746)..(2204755): a, c, g or t
  modified_base (2206807)..(2206812): a, c, g or t
  modified_base (2209392)..(2209392): a, c, g or t
  modified_base (2210768)..(2210768): a, c, g or t
  modified_base (2210983)..(2210986): a, c, g or t
  modified_base (2211374)..(2211374): a, c, g or t
  modified_base (2212180)..(2212180): a, c, g or t
  modified_base (2212324)..(2212324): a, c, g or t
  modified_base (2215006)..(2215009): a, c, g or t
  modified_base (2215016)..(2215016): a, c, g or t
  modified_base (2215072)..(2215077): a, c, g or t
  modified_base (2215087)..(2215087): a, c, g or t
  modified_base (2215545)..(2215545): a, c, g or t
  modified_base (2216652)..(2216652): a, c, g or t
  modified_base (2218962)..(2219000): a, c, g or t
  modified_base (2219002)..(2219002): a, c, g or t
  modified_base (2219023)..(2219027): a, c, g or t
  modified_base (2220740)..(2220748): a, c, g or t
  modified_base (2221594)..(2221594): a, c, g or t
  modified_base (2221826)..(2221829): a, c, g or t
  modified_base (2222192)..(2222192): a, c, g or t
  modified_base (2224885)..(2224885): a, c, g or t
  modified_base (2224888)..(2224893): a, c, g or t
  modified_base (2224898)..(2224899): a, c, g or t
  modified_base (2225896)..(2225896): a, c, g or t
  modified_base (2226475)..(2226475): a, c, g or t
  modified_base (2226527)..(2226527): a, c, g or t
  modified_base (2226902)..(2226902): a, c, g or t
  modified_base (2227975)..(2227975): a, c, g or t
  modified_base (2229073)..(2229073): a, c, g or t
  modified_base (2230791)..(2230794): a, c, g or t
  modified_base (2230796)..(2230796): a, c, g or t
  modified_base (2232274)..(2232274): a, c, g or t
  modified_base (2233491)..(2233491): a, c, g or t
  modified_base (2233493)..(2233493): a, c, g or t
  modified_base (2234294)..(2234294): a, c, g or t
  modified_base (2236848)..(2236848): a, c, g or t
  modified_base (2237825)..(2237825): a, c, g or t
  modified_base (2240303)..(2240303): a, c, g or t
  modified_base (2241256)..(2241256): a, c, g or t
  modified_base (2243119)..(2243119): a, c, g or t
  modified_base (2245078)..(2245078): a, c, g or t
  modified_base (2245098)..(2245098): a, c, g or t
  modified_base (2245236)..(2245237): a, c, g or t
  modified_base (2245239)..(2245247): a, c, g or t
  modified_base (2245996)..(2245999): a, c, g or t
  modified_base (2248493)..(2248496): a, c, g or t
  modified_base (2249987)..(2249987): a, c, g or t
  modified_base (2254511)..(2254517): a, c, g or t
  modified_base (2255966)..(2255966): a, c, g or t
  modified_base (2256338)..(2256341): a, c, g or t
  modified_base (2256745)..(2256751): a, c, g or t
  modified_base (2258175)..(2258175): a, c, g or t
  modified_base (2259270)..(2259270): a, c, g or t
  modified_base (2261843)..(2261843): a, c, g or t
  modified_base (2261848)..(2261858): a, c, g or t
  modified_base (2262697)..(2262697): a, c, g or t
  modified_base (2262705)..(2262705): a, c, g or t
  modified_base (2265397)..(2265397): a, c, g or t
  modified_base (2265560)..(2265560): a, c, g or t
  modified_base (2265732)..(2265733): a, c, g or t
  modified_base (2265739)..(2265743): a, c, g or t
  modified_base (2267160)..(2267160): a, c, g or t
  modified_base (2267207)..(2267207): a, c, g or t
  modified_base (2267224)..(2267224): a, c, g or t
  modified_base (2267238)..(2267238): a, c, g or t
  modified_base (2267249)..(2267249): a, c, g or t
  modified_base (2268168)..(2268168): a, c, g or t
  modified_base (2268646)..(2268646): a, c, g or t
  modified_base (2268741)..(2268741): a, c, g or t
  modified_base (2270937)..(2270937): a, c, g or t
  modified_base (2271317)..(2271317): a, c, g or t
  modified_base (2271865)..(2271865): a, c, g or t
  modified_base (2271892)..(2271892): a, c, g or t
  modified_base (2271906)..(2271906): a, c, g or t
  modified_base (2271952)..(2271952): a, c, g or t
  modified_base (2272263)..(2272263): a, c, g or t
  modified_base (2272480)..(2272481): a, c, g or t
  modified_base (2272484)..(2272487): a, c, g or t
  modified_base (2272836)..(2272836): a, c, g or t
  modified_base (2272974)..(2272974): a, c, g or t
  modified_base (2273263)..(2273263): a, c, g or t
  modified_base (2273624)..(2273627): a, c, g or t
  modified_base (2277161)..(2277161): a, c, g or t
  modified_base (2278605)..(2278628): a, c, g or t
  modified_base (2278646)..(2278648): a, c, g or t
  modified_base (2278650)..(2278651): a, c, g or t
  modified_base (2278654)..(2278654): a, c, g or t
  modified_base (2278815)..(2278815): a, c, g or t
  modified_base (2279832)..(2279832): a, c, g or t
  modified_base (2279834)..(2279837): a, c, g or t
  modified_base (2280878)..(2280878): a, c, g or t
  modified_base (2280986)..(2280986): a, c, g or t
  modified_base (2281557)..(2281557): a, c, g or t
  modified_base (2282449)..(2282449): a, c, g or t
  modified_base (2282536)..(2282536): a, c, g or t
  modified_base (2283027)..(2283027): a, c, g or t
  modified_base (2284291)..(2284292): a, c, g or t
  modified_base (2284294)..(2284305): a, c, g or t
  modified_base (2285953)..(2285953): a, c, g or t
  modified_base (2287001)..(2287003): a, c, g or t
  modified_base (2287446)..(2287449): a, c, g or t
  modified_base (2287452)..(2287455): a, c, g or t
  modified_base (2288743)..(2288743): a, c, g or t
  modified_base (2288862)..(2288862): a, c, g or t
  modified_base (2288933)..(2288933): a, c, g or t
  modified_base (2290227)..(2290233): a, c, g or t
  modified_base (2290907)..(2290907): a, c, g or t
  modified_base (2290917)..(2290917): a, c, g or t
  modified_base (2290954)..(2290954): a, c, g or t
  modified_base (2291144)..(2291144): a, c, g or t
  modified_base (2291959)..(2291962): a, c, g or t
  modified_base (2292442)..(2292442): a, c, g or t
  modified_base (2293207)..(2293210): a, c, g or t
  modified_base (2295856)..(2295861): a, c, g or t
  modified_base (2295867)..(2295868): a, c, g or t
  modified_base (2295966)..(2295969): a, c, g or t
  modified_base (2295993)..(2296024): a, c, g or t
  modified_base (2296041)..(2296042): a, c, g or t
  modified_base (2296044)..(2296045): a, c, g or t
  modified_base (2296051)..(2296051): a, c, g or t
  modified_base (2296054)..(2296068): a, c, g or t
  modified_base (2296772)..(2296775): a, c, g or t
  modified_base (2297102)..(2297102): a, c, g or t
  modified_base (2297706)..(2297706): a, c, g or t
  modified_base (2297885)..(2297885): a, c, g or t
  modified_base (2298769)..(2298769): a, c, g or t
  modified_base (2299225)..(2299229): a, c, g or t
  modified_base (2300238)..(2300238): a, c, g or t
  modified_base (2301867)..(2301867): a, c, g or t
  modified_base (2303275)..(2303275): a, c, g or t
  modified_base (2305692)..(2305692): a, c, g or t
  modified_base (2306144)..(2306145): a, c, g or t
  modified_base (2306404)..(2306416): a, c, g or t
  modified_base (2306929)..(2306929): a, c, g or t
  modified_base (2307052)..(2307052): a, c, g or t
  modified_base (2307174)..(2307175): a, c, g or t
  modified_base (2307177)..(2307178): a, c, g or t
  modified_base (2307412)..(2307412): a, c, g or t
  modified_base (2307452)..(2307457): a, c, g or t
  modified_base (2307459)..(2307460): a, c, g or t
  modified_base (2307536)..(2307537): a, c, g or t
  modified_base (2307543)..(2307546): a, c, g or t
  modified_base (2307548)..(2307602): a, c, g or t
  modified_base (2307608)..(2307609): a, c, g or t
  modified_base (2307613)..(2307614): a, c, g or t
  modified_base (2307618)..(2307619): a, c, g or t
  modified_base (2307623)..(2307680): a, c, g or t
  modified_base (2307686)..(2307687): a, c, g or t
  modified_base (2307700)..(2307759): a, c, g or t
  modified_base (2307765)..(2307766): a, c, g or t
  modified_base (2307798)..(2307798): a, c, g or t
  modified_base (2307821)..(2307821): a, c, g or t
  modified_base (2307823)..(2307824): a, c, g or t
  modified_base (2307834)..(2307835): a, c, g or t
  modified_base (2307839)..(2307840): a, c, g or t
  modified_base (2307844)..(2307845): a, c, g or t
  modified_base (2307849)..(2307855): a, c, g or t
  modified_base (2307866)..(2307867): a, c, g or t
  modified_base (2307871)..(2307872): a, c, g or t
  modified_base (2307878)..(2307926): a, c, g or t
  modified_base (2307928)..(2307929): a, c, g or t
  modified_base (2307951)..(2308002): a, c, g or t
  modified_base (2308004)..(2308005): a, c, g or t
  modified_base (2308058)..(2308101): a, c, g or t
  modified_base (2308103)..(2308107): a, c, g or t
  modified_base (2308111)..(2308112): a, c, g or t
  modified_base (2308291)..(2308336): a, c, g or t
  modified_base (2308415)..(2308415): a, c, g or t
  modified_base (2308467)..(2308467): a, c, g or t
  modified_base (2308473)..(2308473): a, c, g or t
  modified_base (2308522)..(2308522): a, c, g or t
  modified_base (2308535)..(2308535): a, c, g or t
  modified_base (2308547)..(2308547): a, c, g or t
  modified_base (2308565)..(2308565): a, c, g or t
  modified_base (2308569)..(2308569): a, c, g or t
  modified_base (2308586)..(2308586): a, c, g or t
  modified_base (2308595)..(2308595): a, c, g or t
  modified_base (2308645)..(2308645): a, c, g or t
  modified_base (2308705)..(2308705): a, c, g or t
  modified_base (2308732)..(2308732): a, c, g or t
  modified_base (2308871)..(2308908): a, c, g or t
  modified_base (2308965)..(2308965): a, c, g or t
  modified_base (2308968)..(2308970): a, c, g or t
  modified_base (2308972)..(2308976): a, c, g or t
  modified_base (2309022)..(2309062): a, c, g or t
  modified_base (2309166)..(2309173): a, c, g or t
  modified_base (2309175)..(2309182): a, c, g or t
  modified_base (2309199)..(2309199): a, c, g or t
  modified_base (2309353)..(2309353): a, c, g or t
  modified_base (2309361)..(2309361): a, c, g or t
  modified_base (2309400)..(2309401): a, c, g or t
  modified_base (2309403)..(2309408): a, c, g or t
  modified_base (2309410)..(2309411): a, c, g or t
  modified_base (2309416)..(2309416): a, c, g or t
  modified_base (2309614)..(2309620): a, c, g or t
  modified_base (2309649)..(2309649): a, c, g or t
  modified_base (2309652)..(2309704): a, c, g or t
  modified_base (2309890)..(2309895): a, c, g or t
  modified_base (2309899)..(2309899): a, c, g or t
  modified_base (2309924)..(2309924): a, c, g or t
  modified_base (2309993)..(2310034): a, c, g or t
  modified_base (2310043)..(2310043): a, c, g or t
  modified_base (2310106)..(2310109): a, c, g or t
  modified_base (2310180)..(2310180): a, c, g or t
  modified_base (2310211)..(2310211): a, c, g or t
  modified_base (2310234)..(2310234): a, c, g or t
  modified_base (2310248)..(2310248): a, c, g or t
  modified_base (2310307)..(2310309): a, c, g or t
  modified_base (2310332)..(2310372): a, c, g or t
  modified_base (2310525)..(2310525): a, c, g or t
  modified_base (2310551)..(2310551): a, c, g or t
  modified_base (2310556)..(2310556): a, c, g or t
  modified_base (2310610)..(2310610): a, c, g or t
  modified_base (2310614)..(2310614): a, c, g or t
  modified_base (2310617)..(2310617): a, c, g or t
  modified_base (2310622)..(2310639): a, c, g or t
  modified_base (2310649)..(2310649): a, c, g or t
  modified_base (2310662)..(2310663): a, c, g or t
  modified_base (2310671)..(2310671): a, c, g or t
  modified_base (2310725)..(2310773): a, c, g or t
  modified_base (2310802)..(2310802): a, c, g or t
  modified_base (2311098)..(2311101): a, c, g or t
  modified_base (2311155)..(2311192): a, c, g or t
  modified_base (2311264)..(2311264): a, c, g or t
  modified_base (2311291)..(2311291): a, c, g or t
  modified_base (2311304)..(2311307): a, c, g or t
  modified_base (2311318)..(2311319): a, c, g or t
  modified_base (2311332)..(2311335): a, c, g or t
  modified_base (2311341)..(2311342): a, c, g or t
  modified_base (2311344)..(2311390): a, c, g or t
  modified_base (2311392)..(2311393): a, c, g or t
  modified_base (2311431)..(2311431): a, c, g or t
  modified_base (2311459)..(2311615): a, c, g or t
  modified_base (2311647)..(2311648): a, c, g or t
  modified_base (2311671)..(2311673): a, c, g or t
  modified_base (2311675)..(2311729): a, c, g or t
  modified_base (2311766)..(2311848): a, c, g or t
  modified_base (2311859)..(2311860): a, c, g or t
  modified_base (2311932)..(2312019): a, c, g or t
  modified_base (2312279)..(2312284): a, c, g or t
  modified_base (2312304)..(2312320): a, c, g or t
  modified_base (2312334)..(2312334): a, c, g or t
  modified_base (2312339)..(2312340): a, c, g or t
  modified_base (2312343)..(2312343): a, c, g or t
  modified_base (2312426)..(2312466): a, c, g or t
  modified_base (2312472)..(2312473): a, c, g or t
  modified_base (2312488)..(2312587): a, c, g or t
  modified_base (2312628)..(2312642): a, c, g or t
  modified_base (2312647)..(2312648): a, c, g or t
  modified_base (2312716)..(2312723): a, c, g or t
  modified_base (2312746)..(2312850): a, c, g or t
  modified_base (2312875)..(2312934): a, c, g or t
  modified_base (2312958)..(2313029): a, c, g or t
  modified_base (2313031)..(2313031): a, c, g or t
  modified_base (2313068)..(2313113): a, c, g or t
  modified_base (2313155)..(2313197): a, c, g or t
  modified_base (2313241)..(2313241): a, c, g or t
  modified_base (2313277)..(2313277): a, c, g or t
  modified_base (2313280)..(2313280): a, c, g or t
  modified_base (2313311)..(2313351): a, c, g or t
  modified_base (2313365)..(2313365): a, c, g or t
  modified_base (2313370)..(2313370): a, c, g or t
  modified_base (2313403)..(2313403): a, c, g or t
  modified_base (2313439)..(2313439): a, c, g or t
  modified_base (2313463)..(2313463): a, c, g or t
  modified_base (2313519)..(2313519): a, c, g or t
  modified_base (2313552)..(2313553): a, c, g or t
  modified_base (2313556)..(2313598): a, c, g or t
  modified_base (2313605)..(2313605): a, c, g or t
  modified_base (2313673)..(2313676): a, c, g or t
  modified_base (2313685)..(2313724): a, c, g or t
  modified_base (2313738)..(2313738): a, c, g or t
  modified_base (2313819)..(2313819): a, c, g or t
  modified_base (2313823)..(2313843): a, c, g or t
  modified_base (2313912)..(2313912): a, c, g or t
  modified_base (2313978)..(2313978): a, c, g or t
  modified_base (2313987)..(2313987): a, c, g or t
  modified_base (2313996)..(2313996): a, c, g or t
  modified_base (2314018)..(2314062): a, c, g or t
  modified_base (2314181)..(2314181): a, c, g or t
  modified_base (2314334)..(2314374): a, c, g or t
  modified_base (2314523)..(2314523): a, c, g or t
  modified_base (2314604)..(2314604): a, c, g or t
  modified_base (2314644)..(2314681): a, c, g or t
  modified_base (2314685)..(2314686): a, c, g or t
  modified_base (2314710)..(2314713): a, c, g or t
  modified_base (2314721)..(2314721): a, c, g or t
  modified_base (2314756)..(2314756): a, c, g or t
  modified_base (2314835)..(2314885): a, c, g or t
  modified_base (2314907)..(2314946): a, c, g or t
  modified_base (2314979)..(2314979): a, c, g or t
  modified_base (2315009)..(2315009): a, c, g or t
  modified_base (2315027)..(2315027): a, c, g or t
  modified_base (2315033)..(2315034): a, c, g or t
  modified_base (2315037)..(2315077): a, c, g or t
  modified_base (2315090)..(2315095): a, c, g or t
  modified_base (2315322)..(2315322): a, c, g or t
  modified_base (2315337)..(2315337): a, c, g or t
  modified_base (2315355)..(2315355): a, c, g or t
  modified_base (2315358)..(2315360): a, c, g or t
  modified_base (2315366)..(2315406): a, c, g or t
  modified_base (2315409)..(2315409): a, c, g or t
  modified_base (2315457)..(2315502): a, c, g or t
  modified_base (2315511)..(2315511): a, c, g or t
  modified_base (2315517)..(2315517): a, c, g or t
  modified_base (2315520)..(2315520): a, c, g or t
  modified_base (2315526)..(2315579): a, c, g or t
  modified_base (2315623)..(2315662): a, c, g or t
  modified_base (2315706)..(2315706): a, c, g or t
  modified_base (2315732)..(2315780): a, c, g or t
  modified_base (2315804)..(2315806): a, c, g or t
  modified_base (2315810)..(2315811): a, c, g or t
  modified_base (2315813)..(2315828): a, c, g or t
  modified_base (2315903)..(2315906): a, c, g or t
  modified_base (2315908)..(2315908): a, c, g or t
  modified_base (2316008)..(2316008): a, c, g or t
  modified_base (2316012)..(2316012): a, c, g or t
  modified_base (2316165)..(2316165): a, c, g or t
  modified_base (2316291)..(2316291): a, c, g or t
  modified_base (2316300)..(2316300): a, c, g or t
  modified_base (2316315)..(2316315): a, c, g or t
  modified_base (2316327)..(2316327): a, c, g or t
  modified_base (2316465)..(2316465): a, c, g or t
  modified_base (2316519)..(2316519): a, c, g or t
  modified_base (2316541)..(2316546): a, c, g or t
  modified_base (2316683)..(2316683): a, c, g or t
  modified_base (2316755)..(2316755): a, c, g or t
  modified_base (2316785)..(2316785): a, c, g or t
  modified_base (2316836)..(2316836): a, c, g or t
  modified_base (2316948)..(2316950): a, c, g or t
  modified_base (2317054)..(2317054): a, c, g or t
  modified_base (2317062)..(2317062): a, c, g or t
  modified_base (2317183)..(2317183): a, c, g or t
  modified_base (2317186)..(2317186): a, c, g or t
  modified_base (2317188)..(2317206): a, c, g or t
  modified_base (2317210)..(2317210): a, c, g or t
  modified_base (2317218)..(2317219): a, c, g or t
  modified_base (2317221)..(2317222): a, c, g or t
  modified_base (2317375)..(2317375): a, c, g or t
  modified_base (2317399)..(2317399): a, c, g or t
  modified_base (2317486)..(2317486): a, c, g or t
  modified_base (2317726)..(2317726): a, c, g or t
  modified_base (2317737)..(2317737): a, c, g or t
  modified_base (2317749)..(2317749): a, c, g or t
  modified_base (2317797)..(2317797): a, c, g or t
  modified_base (2317813)..(2317813): a, c, g or t
  modified_base (2317903)..(2317903): a, c, g or t
  modified_base (2319617)..(2319617): a, c, g or t
  modified_base (2319671)..(2319671): a, c, g or t
  modified_base (2319673)..(2319676): a, c, g or t
  modified_base (2319782)..(2319782): a, c, g or t
  modified_base (2320203)..(2320203): a, c, g or t
  modified_base (2320273)..(2320278): a, c, g or t
  modified_base (2320282)..(2320282): a, c, g or t
  modified_base (2320333)..(2320336): a, c, g or t
  modified_base (2320339)..(2320339): a, c, g or t
  modified_base (2320383)..(2320400): a, c, g or t
  modified_base (2320412)..(2320412): a, c, g or t
  modified_base (2320526)..(2320526): a, c, g or t
  modified_base (2320595)..(2320643): a, c, g or t
  modified_base (2320646)..(2320646): a, c, g or t
  modified_base (2320673)..(2320673): a, c, g or t
  modified_base (2320675)..(2320720): a, c, g or t
  modified_base (2320731)..(2320732): a, c, g or t
  modified_base (2320742)..(2320782): a, c, g or t
  modified_base (2320803)..(2320816): a, c, g or t
  modified_base (2320830)..(2320836): a, c, g or t
  modified_base (2320842)..(2320842): a, c, g or t
  modified_base (2320845)..(2320845): a, c, g or t
  modified_base (2320848)..(2320848): a, c, g or t
  modified_base (2320896)..(2320896): a, c, g or t
  modified_base (2320987)..(2320990): a, c, g or t
  modified_base (2321056)..(2321056): a, c, g or t
  modified_base (2321156)..(2321196): a, c, g or t
  modified_base (2321957)..(2321957): a, c, g or t
  modified_base (2321963)..(2321963): a, c, g or t
  modified_base (2321999)..(2322002): a, c, g or t
  modified_base (2322005)..(2322029): a, c, g or t
  modified_base (2322035)..(2322039): a, c, g or t
  modified_base (2322181)..(2322181): a, c, g or t
  modified_base (2322734)..(2322734): a, c, g or t
  modified_base (2322741)..(2322743): a, c, g or t
  modified_base (2322751)..(2322752): a, c, g or t
  modified_base (2323168)..(2323209): a, c, g or t
  modified_base (2323774)..(2323774): a, c, g or t
  modified_base (2323866)..(2323867): a, c, g or t
  modified_base (2324051)..(2324091): a, c, g or t
  modified_base (2325273)..(2325273): a, c, g or t
  modified_base (2327022)..(2327022): a, c, g or t
  modified_base (2327418)..(2327418): a, c, g or t
  modified_base (2327895)..(2327895): a, c, g or t
  modified_base (2328847)..(2328847): a, c, g or t
  modified_base (2328850)..(2328952): a, c, g or t
  modified_base (2328984)..(2328989): a, c, g or t
  modified_base (2328994)..(2329043): a, c, g or t
  modified_base (2329077)..(2329077): a, c, g or t
  modified_base (2329178)..(2329178): a, c, g or t
  modified_base (2329187)..(2329229): a, c, g or t
  modified_base (2329325)..(2329332): a, c, g or t
  modified_base (2329362)..(2329363): a, c, g or t
  modified_base (2329392)..(2329392): a, c, g or t
  modified_base (2329404)..(2329417): a, c, g or t
  modified_base (2329443)..(2329499): a, c, g or t
  modified_base (2329534)..(2329639): a, c, g or t
  modified_base (2329674)..(2329674): a, c, g or t
  modified_base (2329677)..(2329885): a, c, g or t
  modified_base (2329887)..(2329888): a, c, g or t
  modified_base (2329909)..(2330163): a, c, g or t
  modified_base (2330165)..(2330171): a, c, g or t
  modified_base (2330177)..(2330177): a, c, g or t
  modified_base (2330194)..(2330201): a, c, g or t
  modified_base (2330212)..(2330212): a, c, g or t
  modified_base (2330226)..(2330249): a, c, g or t
  modified_base (2330259)..(2330260): a, c, g or t
  modified_base (2330274)..(2330274): a, c, g or t
  modified_base (2330280)..(2330281): a, c, g or t
  modified_base (2330318)..(2330319): a, c, g or t
  modified_base (2330324)..(2330347): a, c, g or t
  modified_base (2330355)..(2330356): a, c, g or t
  modified_base (2330385)..(2330385): a, c, g or t
  modified_base (2330387)..(2330395): a, c, g or t
  modified_base (2330397)..(2330398): a, c, g or t
  modified_base (2330402)..(2330403): a, c, g or t
  modified_base (2330406)..(2330406): a, c, g or t
  modified_base (2330419)..(2330438): a, c, g or t
  modified_base (2330491)..(2330572): a, c, g or t
  modified_base (2330586)..(2330586): a, c, g or t
  modified_base (2330589)..(2330591): a, c, g or t
  modified_base (2330593)..(2330594): a, c, g or t
  modified_base (2330596)..(2330604): a, c, g or t
  modified_base (2330655)..(2330655): a, c, g or t
  modified_base (2330658)..(2330664): a, c, g or t
  modified_base (2330755)..(2330779): a, c, g or t
  modified_base (2330791)..(2330792): a, c, g or t
  modified_base (2330803)..(2330817): a, c, g or t
  modified_base (2330841)..(2330857): a, c, g or t
  modified_base (2330914)..(2330953): a, c, g or t
  modified_base (2331105)..(2331156): a, c, g or t
  modified_base (2331179)..(2331179): a, c, g or t
  modified_base (2331201)..(2331248): a, c, g or t
  modified_base (2331262)..(2331262): a, c, g or t
  modified_base (2331364)..(2331364): a, c, g or t
  modified_base (2331403)..(2331465): a, c, g or t
  modified_base (2331689)..(2331696): a, c, g or t
  modified_base (2332026)..(2332066): a, c, g or t
  modified_base (2332192)..(2332239): a, c, g or t
  modified_base (2332247)..(2332247): a, c, g or t
  modified_base (2332304)..(2332307): a, c, g or t
  modified_base (2332335)..(2332336): a, c, g or t
  modified_base (2332338)..(2332341): a, c, g or t
  modified_base (2332416)..(2332453): a, c, g or t
  modified_base (2332486)..(2332486): a, c, g or t
  modified_base (2332537)..(2332594): a, c, g or t
  modified_base (2332966)..(2333017): a, c, g or t
  modified_base (2333022)..(2333023): a, c, g or t
  modified_base (2333086)..(2333089): a, c, g or t
  modified_base (2333375)..(2333434): a, c, g or t
  modified_base (2333447)..(2333448): a, c, g or t
  modified_base (2333452)..(2333453): a, c, g or t
  modified_base (2333456)..(2333464): a, c, g or t
  modified_base (2333466)..(2333466): a, c, g or t
  modified_base (2333555)..(2333555): a, c, g or t
  modified_base (2333595)..(2333676): a, c, g or t
  modified_base (2333678)..(2333681): a, c, g or t
  modified_base (2333683)..(2333683): a, c, g or t
  modified_base (2333703)..(2333705): a, c, g or t
  modified_base (2333716)..(2333720): a, c, g or t
  modified_base (2333790)..(2333790): a, c, g or t
  modified_base (2333792)..(2333800): a, c, g or t
  modified_base (2333867)..(2333907): a, c, g or t
  modified_base (2333909)..(2333910): a, c, g or t
  modified_base (2333923)..(2333924): a, c, g or t
  modified_base (2333952)..(2333959): a, c, g or t
  modified_base (2334016)..(2334016): a, c, g or t
  modified_base (2334028)..(2334030): a, c, g or t
  modified_base (2334033)..(2334034): a, c, g or t
  modified_base (2334036)..(2334048): a, c, g or t
  modified_base (2334085)..(2334141): a, c, g or t
  modified_base (2334147)..(2334147): a, c, g or t
  modified_base (2334276)..(2334315): a, c, g or t
  modified_base (2334391)..(2334430): a, c, g or t
  modified_base (2334465)..(2334465): a, c, g or t
  modified_base (2334496)..(2334537): a, c, g or t
  modified_base (2334681)..(2334721): a, c, g or t
  modified_base (2335005)..(2335005): a, c, g or t
  modified_base (2335128)..(2335128): a, c, g or t
  modified_base (2335478)..(2335480): a, c, g or t
  modified_base (2335482)..(2335525): a, c, g or t
  modified_base (2335543)..(2335543): a, c, g or t
  modified_base (2335621)..(2335624): a, c, g or t
  modified_base (2335626)..(2335693): a, c, g or t
  modified_base (2335715)..(2335715): a, c, g or t
  modified_base (2335720)..(2335745): a, c, g or t
  modified_base (2335749)..(2335750): a, c, g or t
  modified_base (2335792)..(2335793): a, c, g or t
  modified_base (2335795)..(2335797): a, c, g or t
  modified_base (2335799)..(2335803): a, c, g or t
  modified_base (2335824)..(2335858): a, c, g or t
  modified_base (2335874)..(2335874): a, c, g or t
  modified_base (2335884)..(2335884): a, c, g or t
  modified_base (2335913)..(2335914): a, c, g or t
  modified_base (2335971)..(2335996): a, c, g or t
  modified_base (2336002)..(2336003): a, c, g or t
  modified_base (2336047)..(2336121): a, c, g or t
  modified_base (2336129)..(2336129): a, c, g or t
  modified_base (2336141)..(2336142): a, c, g or t
  modified_base (2336144)..(2336176): a, c, g or t
  modified_base (2336201)..(2336201): a, c, g or t
  modified_base (2336203)..(2336204): a, c, g or t
  modified_base (2336231)..(2336265): a, c, g or t
  modified_base (2336282)..(2336282): a, c, g or t
  modified_base (2336306)..(2336316): a, c, g or t
  modified_base (2336333)..(2336333): a, c, g or t
  modified_base (2336336)..(2336336): a, c, g or t
  modified_base (2336340)..(2336360): a, c, g or t
  modified_base (2336371)..(2336372): a, c, g or t
  modified_base (2336374)..(2336375): a, c, g or t
  modified_base (2336378)..(2336378): a, c, g or t
  modified_base (2336381)..(2336382): a, c, g or t
  modified_base (2336388)..(2336390): a, c, g or t
  modified_base (2336401)..(2336402): a, c, g or t
  modified_base (2336409)..(2336412): a, c, g or t
  modified_base (2336420)..(2336495): a, c, g or t
  modified_base (2336511)..(2336511): a, c, g or t
  modified_base (2336519)..(2336545): a, c, g or t
  modified_base (2336582)..(2336583): a, c, g or t
  modified_base (2336601)..(2336601): a, c, g or t
  modified_base (2336605)..(2336621): a, c, g or t
  modified_base (2336626)..(2336626): a, c, g or t
  modified_base (2336628)..(2336630): a, c, g or t
  modified_base (2336684)..(2336684): a, c, g or t
  modified_base (2336693)..(2336693): a, c, g or t
  modified_base (2336697)..(2336727): a, c, g or t
  modified_base (2336732)..(2336734): a, c, g or t
  modified_base (2336768)..(2336768): a, c, g or t
  modified_base (2336795)..(2336795): a, c, g or t
  modified_base (2336802)..(2336809): a, c, g or t
  modified_base (2336840)..(2336841): a, c, g or t
  modified_base (2336843)..(2336878): a, c, g or t
  modified_base (2336882)..(2336883): a, c, g or t
  modified_base (2336888)..(2336889): a, c, g or t
  modified_base (2336896)..(2336897): a, c, g or t
  modified_base (2336899)..(2336933): a, c, g or t
  modified_base (2336942)..(2336942): a, c, g or t
  modified_base (2337063)..(2337063): a, c, g or t
  modified_base (2337347)..(2337349): a, c, g or t
  modified_base (2337438)..(2337439): a, c, g or t
  modified_base (2337725)..(2337751): a, c, g or t
  modified_base (2338050)..(2338050): a, c, g or t
  modified_base (2338206)..(2338208): a, c, g or t
  modified_base (2338210)..(2338214): a, c, g or t
  modified_base (2338218)..(2338219): a, c, g or t
  modified_base (2338252)..(2338314): a, c, g or t
  modified_base (2338357)..(2338386): a, c, g or t
  modified_base (2338390)..(2338391): a, c, g or t
  modified_base (2338403)..(2338403): a, c, g or t
  modified_base (2338407)..(2338407): a, c, g or t
  modified_base (2338409)..(2338410): a, c, g or t
  modified_base (2339040)..(2339041): a, c, g or t
  modified_base (2340101)..(2340101): a, c, g or t
  modified_base (2340209)..(2340209): a, c, g or t
  modified_base (2341096)..(2341096): a, c, g or t
  modified_base (2341482)..(2341482): a, c, g or t
  modified_base (2341517)..(2341517): a, c, g or t
  modified_base (2341570)..(2341570): a, c, g or t
  modified_base (2341948)..(2341948): a, c, g or t
  modified_base (2342183)..(2342184): a, c, g or t
  modified_base (2342653)..(2342654): a, c, g or t
  modified_base (2343190)..(2343191): a, c, g or t
  modified_base (2343661)..(2343662): a, c, g or t
  modified_base (2343760)..(2343760): a, c, g or t
  modified_base (2345077)..(2345077): a, c, g or t
  modified_base (2345364)..(2345364): a, c, g or t
  modified_base (2345596)..(2345596): a, c, g or t
  modified_base (2345598)..(2345599): a, c, g or t
  modified_base (2345624)..(2345624): a, c, g or t
  modified_base (2345912)..(2345913): a, c, g or t
  modified_base (2345977)..(2345978): a, c, g or t
  modified_base (2346920)..(2346920): a, c, g or t
  modified_base (2347710)..(2347719): a, c, g or t
  modified_base (2347944)..(2347947): a, c, g or t
  modified_base (2347952)..(2347952): a, c, g or t
  modified_base (2348602)..(2348642): a, c, g or t
  modified_base (2348663)..(2348705): a, c, g or t
  modified_base (2348728)..(2348768): a, c, g or t
  modified_base (2348792)..(2348832): a, c, g or t
  modified_base (2348858)..(2348858): a, c, g or t
  modified_base (2348860)..(2348898): a, c, g or t
  modified_base (2348922)..(2348961): a, c, g or t
  modified_base (2349003)..(2349011): a, c, g or t
  modified_base (2354137)..(2354137): a, c, g or t
  modified_base (2354149)..(2354149): a, c, g or t
  modified_base (2355304)..(2355304): a, c, g or t
  modified_base (2355325)..(2355325): a, c, g or t
  modified_base (2355338)..(2355338): a, c, g or t
  modified_base (2355683)..(2355683): a, c, g or t
  modified_base (2355712)..(2355712): a, c, g or t
  modified_base (2355725)..(2355725): a, c, g or t
  modified_base (2356518)..(2356521): a, c, g or t
  modified_base (2356945)..(2356945): a, c, g or t
  modified_base (2358816)..(2358816): a, c, g or t
  modified_base (2359731)..(2359736): a, c, g or t
  modified_base (2360809)..(2360810): a, c, g or t
  modified_base (2361034)..(2361034): a, c, g or t
  modified_base (2361283)..(2361283): a, c, g or t
  modified_base (2363173)..(2363174): a, c, g or t
  modified_base (2363177)..(2363179): a, c, g or t
  modified_base (2363346)..(2363349): a, c, g or t
  modified_base (2363389)..(2363391): a, c, g or t
  modified_base (2363668)..(2363668): a, c, g or t
  modified_base (2365723)..(2365723): a, c, g or t
  modified_base (2366181)..(2366190): a, c, g or t
  modified_base (2366406)..(2366413): a, c, g or t
  modified_base (2368192)..(2368192): a, c, g or t
  modified_base (2368671)..(2368671): a, c, g or t
  modified_base (2368746)..(2368746): a, c, g or t
  modified_base (2369318)..(2369318): a, c, g or t
  modified_base (2369320)..(2369322): a, c, g or t
  modified_base (2370530)..(2370530): a, c, g or t
  modified_base (2370704)..(2370704): a, c, g or t
  modified_base (2370708)..(2370708): a, c, g or t
  modified_base (2371116)..(2371116): a, c, g or t
  modified_base (2374782)..(2374782): a, c, g or t
  modified_base (2375594)..(2375597): a, c, g or t
  modified_base (2375689)..(2375692): a, c, g or t
  modified_base (2375990)..(2375990): a, c, g or t
  modified_base (2377589)..(2377589): a, c, g or t
  modified_base (2379803)..(2379803): a, c, g or t
  modified_base (2384380)..(2384380): a, c, g or t
  modified_base (2384534)..(2384535): a, c, g or t
  modified_base (2385449)..(2385450): a, c, g or t
  modified_base (2385485)..(2385486): a, c, g or t
  modified_base (2385492)..(2385498): a, c, g or t
  modified_base (2385574)..(2385690): a, c, g or t
  modified_base (2385722)..(2385725): a, c, g or t
  modified_base (2386088)..(2386088): a, c, g or t
  modified_base (2386090)..(2386091): a, c, g or t
  modified_base (2387456)..(2387457): a, c, g or t
  modified_base (2387459)..(2387460): a, c, g or t
  modified_base (2387517)..(2387519): a, c, g or t
  modified_base (2387840)..(2387840): a, c, g or t
  modified_base (2390132)..(2390132): a, c, g or t
  modified_base (2390275)..(2390275): a, c, g or t
  modified_base (2391458)..(2391458): a, c, g or t
  modified_base (2395031)..(2395035): a, c, g or t
  modified_base (2398174)..(2398174): a, c, g or t
  modified_base (2399148)..(2399148): a, c, g or t
  modified_base (2399219)..(2399223): a, c, g or t
  modified_base (2400774)..(2400774): a, c, g or t
  modified_base (2400806)..(2400806): a, c, g or t
  modified_base (2400825)..(2400830): a, c, g or t
  modified_base (2401194)..(2401194): a, c, g or t
  modified_base (2401642)..(2401642): a, c, g or t
  modified_base (2406672)..(2406675): a, c, g or t
  modified_base (2406778)..(2406782): a, c, g or t
  modified_base (2407667)..(2407667): a, c, g or t
  modified_base (2409963)..(2409964): a, c, g or t
  modified_base (2410236)..(2410239): a, c, g or t
  modified_base (2410283)..(2410283): a, c, g or t
  modified_base (2410357)..(2410361): a, c, g or t
  modified_base (2410364)..(2410364): a, c, g or t
  modified_base (2411914)..(2411914): a, c, g or t
  modified_base (2415771)..(2415774): a, c, g or t
  modified_base (2416399)..(2416400): a, c, g or t
  modified_base (2416406)..(2416407): a, c, g or t
  modified_base (2419025)..(2419026): a, c, g or t
  modified_base (2419132)..(2419135): a, c, g or t
  modified_base (2419137)..(2419138): a, c, g or t
  modified_base (2423085)..(2423086): a, c, g or t
  modified_base (2423655)..(2423658): a, c, g or t
  modified_base (2423662)..(2423672): a, c, g or t
  modified_base (2423795)..(2423810): a, c, g or t
  modified_base (2424695)..(2424696): a, c, g or t
  modified_base (2424698)..(2424701): a, c, g or t
  modified_base (2424737)..(2424746): a, c, g or t
  modified_base (2424902)..(2424903): a, c, g or t
  modified_base (2425955)..(2425956): a, c, g or t
  modified_base (2427322)..(2427323): a, c, g or t
  modified_base (2427528)..(2427529): a, c, g or t
  modified_base (2428812)..(2428824): a, c, g or t
  modified_base (2429615)..(2429625): a, c, g or t
  modified_base (2429628)..(2429629): a, c, g or t
  modified_base (2430550)..(2430553): a, c, g or t
  modified_base (2431764)..(2431765): a, c, g or t
  modified_base (2431768)..(2431774): a, c, g or t
  modified_base (2433072)..(2433080): a, c, g or t
  modified_base (2434190)..(2434194): a, c, g or t
  modified_base (2434280)..(2434319): a, c, g or t
  modified_base (2434400)..(2434439): a, c, g or t
  modified_base (2435669)..(2435669): a, c, g or t
  modified_base (2435672)..(2435677): a, c, g or t
  modified_base (2436931)..(2436931): a, c, g or t
  modified_base (2438463)..(2438463): a, c, g or t
  modified_base (2438476)..(2438479): a, c, g or t
  modified_base (2438659)..(2438662): a, c, g or t
  modified_base (2439809)..(2439815): a, c, g or t
  modified_base (2439853)..(2439853): a, c, g or t
  modified_base (2440058)..(2440058): a, c, g or t
  modified_base (2442035)..(2442050): a, c, g or t
  modified_base (2442068)..(2442068): a, c, g or t
  modified_base (2442147)..(2442150): a, c, g or t
  modified_base (2442154)..(2442154): a, c, g or t
  modified_base (2442254)..(2442259): a, c, g or t
  modified_base (2442333)..(2442334): a, c, g or t
  modified_base (2442503)..(2442504): a, c, g or t
  modified_base (2444244)..(2444244): a, c, g or t
  modified_base (2444523)..(2444528): a, c, g or t
  modified_base (2444663)..(2444667): a, c, g or t
  modified_base (2445080)..(2445080): a, c, g or t
  modified_base (2445083)..(2445083): a, c, g or t
  modified_base (2445225)..(2445229): a, c, g or t
  modified_base (2445349)..(2445349): a, c, g or t
  modified_base (2446713)..(2446713): a, c, g or t
  modified_base (2446954)..(2446957): a, c, g or t
  modified_base (2447029)..(2447037): a, c, g or t
  modified_base (2447352)..(2447352): a, c, g or t
  modified_base (2447375)..(2447378): a, c, g or t
  modified_base (2448091)..(2448092): a, c, g or t
  modified_base (2449867)..(2449868): a, c, g or t
  modified_base (2451715)..(2451715): a, c, g or t
  modified_base (2451903)..(2451905): a, c, g or t
  modified_base (2452097)..(2452102): a, c, g or t
  modified_base (2452141)..(2452141): a, c, g or t
  modified_base (2453032)..(2453036): a, c, g or t
  modified_base (2453039)..(2453040): a, c, g or t
  modified_base (2454987)..(2454987): a, c, g or t
  modified_base (2455984)..(2455984): a, c, g or t
  modified_base (2456655)..(2456655): a, c, g or t
  modified_base (2456657)..(2456657): a, c, g or t
  modified_base (2457838)..(2457842): a, c, g or t
  modified_base (2458137)..(2458137): a, c, g or t
  modified_base (2459333)..(2459333): a, c, g or t
  modified_base (2459657)..(2459657): a, c, g or t
  modified_base (2460569)..(2460574): a, c, g or t
  modified_base (2460804)..(2460812): a, c, g or t
  modified_base (2460861)..(2460876): a, c, g or t
  modified_base (2460883)..(2460887): a, c, g or t
  modified_base (2461542)..(2461542): a, c, g or t
  modified_base (2462806)..(2462811): a, c, g or t
  modified_base (2462867)..(2462867): a, c, g or t
  modified_base (2463194)..(2463194): a, c, g or t
  modified_base (2464545)..(2464549): a, c, g or t
  modified_base (2465559)..(2465603): a, c, g or t
  modified_base (2465623)..(2465623): a, c, g or t
  modified_base (2465726)..(2465726): a, c, g or t
  modified_base (2465737)..(2465776): a, c, g or t
  modified_base (2466316)..(2466320): a, c, g or t
  modified_base (2467746)..(2467747): a, c, g or t
  modified_base (2468314)..(2468319): a, c, g or t
  modified_base (2469098)..(2469103): a, c, g or t
  modified_base (2469155)..(2469155): a, c, g or t
  modified_base (2469158)..(2469158): a, c, g or t
  modified_base (2469161)..(2469161): a, c, g or t
  modified_base (2470080)..(2470081): a, c, g or t
  modified_base (2470954)..(2470959): a, c, g or t
  modified_base (2470996)..(2470996): a, c, g or t
  modified_base (2471004)..(2471004): a, c, g or t
  modified_base (2471615)..(2471615): a, c, g or t
  modified_base (2471665)..(2471669): a, c, g or t
  modified_base (2471759)..(2471763): a, c, g or t
  modified_base (2471778)..(2471778): a, c, g or t
  modified_base (2473846)..(2473849): a, c, g or t
  modified_base (2473910)..(2473913): a, c, g or t
  modified_base (2473936)..(2473937): a, c, g or t
  modified_base (2474002)..(2474002): a, c, g or t
  modified_base (2474476)..(2474476): a, c, g or t
  modified_base (2474521)..(2474521): a, c, g or t
  modified_base (2475132)..(2475135): a, c, g or t
  modified_base (2475217)..(2475217): a, c, g or t
  modified_base (2475379)..(2475380): a, c, g or t
  modified_base (2475384)..(2475391): a, c, g or t
  modified_base (2477794)..(2477794): a, c, g or t
  modified_base (2477799)..(2477799): a, c, g or t
  modified_base (2478667)..(2478670): a, c, g or t
  modified_base (2478818)..(2478818): a, c, g or t
  modified_base (2478832)..(2478832): a, c, g or t
  modified_base (2478852)..(2478852): a, c, g or t
  modified_base (2479070)..(2479081): a, c, g or t
  modified_base (2481456)..(2481456): a, c, g or t
  modified_base (2481538)..(2481538): a, c, g or t
  modified_base (2481964)..(2481967): a, c, g or t
  modified_base (2482144)..(2482149): a, c, g or t
  modified_base (2485041)..(2485042): a, c, g or t
  modified_base (2486726)..(2486726): a, c, g or t
  modified_base (2486958)..(2486958): a, c, g or t
  modified_base (2487431)..(2487435): a, c, g or t
  modified_base (2487471)..(2487471): a, c, g or t
  modified_base (2487680)..(2487680): a, c, g or t
  modified_base (2488798)..(2488798): a, c, g or t
  modified_base (2489140)..(2489143): a, c, g or t
  modified_base (2489310)..(2489313): a, c, g or t
  modified_base (2489315)..(2489320): a, c, g or t
  modified_base (2489480)..(2489483): a, c, g or t
  modified_base (2489596)..(2489599): a, c, g or t
  modified_base (2489601)..(2489614): a, c, g or t
  modified_base (2490647)..(2490647): a, c, g or t
  modified_base (2496717)..(2496720): a, c, g or t
  modified_base (2500859)..(2500896): a, c, g or t
  modified_base (2501034)..(2501077): a, c, g or t
  modified_base (2501695)..(2501695): a, c, g or t
  modified_base (2502321)..(2502329): a, c, g or t
  modified_base (2504069)..(2504069): a, c, g or t
  modified_base (2505410)..(2505410): a, c, g or t
  modified_base (2505553)..(2505553): a, c, g or t
  modified_base (2505556)..(2505560): a, c, g or t
  modified_base (2505584)..(2505584): a, c, g or t
  modified_base (2506706)..(2506706): a, c, g or t
  modified_base (2506886)..(2506886): a, c, g or t
  modified_base (2507412)..(2507421): a, c, g or t
  modified_base (2507519)..(2507519): a, c, g or t
  modified_base (2508426)..(2508426): a, c, g or t
  modified_base (2511396)..(2511396): a, c, g or t
  modified_base (2511398)..(2511401): a, c, g or t
  modified_base (2511407)..(2511407): a, c, g or t
  modified_base (2511566)..(2511570): a, c, g or t
  modified_base (2511643)..(2511643): a, c, g or t
  modified_base (2512041)..(2512045): a, c, g or t
  modified_base (2512049)..(2512049): a, c, g or t
  modified_base (2513078)..(2513078): a, c, g or t
  modified_base (2513253)..(2513253): a, c, g or t
  modified_base (2513543)..(2513543): a, c, g or t
  modified_base (2514290)..(2514290): a, c, g or t
  modified_base (2515213)..(2515214): a, c, g or t
  modified_base (2515216)..(2515222): a, c, g or t
  modified_base (2515272)..(2515280): a, c, g or t
  modified_base (2515285)..(2515288): a, c, g or t
  modified_base (2516358)..(2516358): a, c, g or t
  modified_base (2516475)..(2516475): a, c, g or t
  modified_base (2516722)..(2516726): a, c, g or t
  modified_base (2516900)..(2516903): a, c, g or t
  modified_base (2517311)..(2517312): a, c, g or t
  modified_base (2519031)..(2519031): a, c, g or t
  modified_base (2520332)..(2520333): a, c, g or t
  modified_base (2520335)..(2520336): a, c, g or t
  modified_base (2521235)..(2521236): a, c, g or t
  modified_base (2522202)..(2522202): a, c, g or t
  modified_base (2522561)..(2522561): a, c, g or t
  modified_base (2523106)..(2523107): a, c, g or t
  modified_base (2523255)..(2523256): a, c, g or t
  modified_base (2523262)..(2523264): a, c, g or t
  modified_base (2523312)..(2523314): a, c, g or t
  modified_base (2523316)..(2523317): a, c, g or t
  modified_base (2523325)..(2523326): a, c, g or t
  modified_base (2524131)..(2524131): a, c, g or t
  modified_base (2524560)..(2524566): a, c, g or t
  modified_base (2524687)..(2524690): a, c, g or t
  modified_base (2525207)..(2525207): a, c, g or t
  modified_base (2525681)..(2525681): a, c, g or t
  modified_base (2526598)..(2526598): a, c, g or t
  modified_base (2526672)..(2526677): a, c, g or t
  modified_base (2528643)..(2528643): a, c, g or t
  modified_base (2528679)..(2528725): a, c, g or t
  modified_base (2528768)..(2528769): a, c, g or t
  modified_base (2528773)..(2528774): a, c, g or t
  modified_base (2529244)..(2529244): a, c, g or t
  modified_base (2530175)..(2530175): a, c, g or t
  modified_base (2531843)..(2531843): a, c, g or t
  modified_base (2532702)..(2532702): a, c, g or t
  modified_base (2533937)..(2533937): a, c, g or t
  modified_base (2533967)..(2533967): a, c, g or t
  modified_base (2534196)..(2534196): a, c, g or t
  modified_base (2535136)..(2535136): a, c, g or t
  modified_base (2535140)..(2535141): a, c, g or t
  modified_base (2535147)..(2535148): a, c, g or t
  modified_base (2535213)..(2535213): a, c, g or t
  modified_base (2535217)..(2535218): a, c, g or t
  modified_base (2535220)..(2535221): a, c, g or t
  modified_base (2535225)..(2535228): a, c, g or t
  modified_base (2535318)..(2535321): a, c, g or t
  modified_base (2535357)..(2535357): a, c, g or t
  modified_base (2535360)..(2535360): a, c, g or t
  modified_base (2535364)..(2535376): a, c, g or t
  modified_base (2535575)..(2535614): a, c, g or t
  modified_base (2535616)..(2535617): a, c, g or t
  modified_base (2535671)..(2535672): a, c, g or t
  modified_base (2535678)..(2535728): a, c, g or t
  modified_base (2535739)..(2535740): a, c, g or t
  modified_base (2535743)..(2535744): a, c, g or t
  modified_base (2535752)..(2535773): a, c, g or t
  modified_base (2535775)..(2535776): a, c, g or t
  modified_base (2535780)..(2535781): a, c, g or t
  modified_base (2535796)..(2535797): a, c, g or t
  modified_base (2535803)..(2535804): a, c, g or t
  modified_base (2535817)..(2535819): a, c, g or t
  modified_base (2535867)..(2535934): a, c, g or t
  modified_base (2535941)..(2535941): a, c, g or t
  modified_base (2535958)..(2536043): a, c, g or t
  modified_base (2536795)..(2536795): a, c, g or t
  modified_base (2537967)..(2537970): a, c, g or t
  modified_base (2538177)..(2538181): a, c, g or t
  modified_base (2538363)..(2538366): a, c, g or t
  modified_base (2538433)..(2538433): a, c, g or t
  modified_base (2539027)..(2539028): a, c, g or t
  modified_base (2539599)..(2539599): a, c, g or t
  modified_base (2540057)..(2540061): a, c, g or t
  modified_base (2540756)..(2540759): a, c, g or t
  modified_base (2541642)..(2541642): a, c, g or t
  modified_base (2541705)..(2541705): a, c, g or t
  modified_base (2544698)..(2544701): a, c, g or t
  modified_base (2545215)..(2545218): a, c, g or t
  modified_base (2545817)..(2545817): a, c, g or t
  modified_base (2545890)..(2545891): a, c, g or t
  modified_base (2548138)..(2548141): a, c, g or t
  modified_base (2548176)..(2548179): a, c, g or t
  modified_base (2548537)..(2548538): a, c, g or t
  modified_base (2548885)..(2548885): a, c, g or t
  modified_base (2548911)..(2548911): a, c, g or t
  modified_base (2548933)..(2548952): a, c, g or t
  modified_base (2549421)..(2549424): a, c, g or t
  modified_base (2549629)..(2549629): a, c, g or t
  modified_base (2549790)..(2549834): a, c, g or t
  modified_base (2549933)..(2549938): a, c, g or t
  modified_base (2549940)..(2549988): a, c, g or t
  modified_base (2550040)..(2550040): a, c, g or t
  modified_base (2550082)..(2550082): a, c, g or t
  modified_base (2550112)..(2550112): a, c, g or t
  modified_base (2550161)..(2550161): a, c, g or t
  modified_base (2550188)..(2550188): a, c, g or t
  modified_base (2550219)..(2550219): a, c, g or t
  modified_base (2550287)..(2550287): a, c, g or t
  modified_base (2550314)..(2550314): a, c, g or t
  modified_base (2550343)..(2550343): a, c, g or t
  modified_base (2550446)..(2550454): a, c, g or t
  modified_base (2550529)..(2550530): a, c, g or t
  modified_base (2550707)..(2550707): a, c, g or t
  modified_base (2550709)..(2550729): a, c, g or t
  modified_base (2550760)..(2550761): a, c, g or t
  modified_base (2550764)..(2550804): a, c, g or t
  modified_base (2550883)..(2550886): a, c, g or t
  modified_base (2550888)..(2550891): a, c, g or t
  modified_base (2550893)..(2550893): a, c, g or t
  modified_base (2550929)..(2550973): a, c, g or t
  modified_base (2551023)..(2551025): a, c, g or t
  modified_base (2551068)..(2551071): a, c, g or t
  modified_base (2551096)..(2551097): a, c, g or t
  modified_base (2551110)..(2551110): a, c, g or t
  modified_base (2551137)..(2551137): a, c, g or t
  modified_base (2551182)..(2551182): a, c, g or t
  modified_base (2551212)..(2551263): a, c, g or t
  modified_base (2551297)..(2551340): a, c, g or t
  modified_base (2551342)..(2551344): a, c, g or t
  modified_base (2551368)..(2551369): a, c, g or t
  modified_base (2551371)..(2551373): a, c, g or t
  modified_base (2551406)..(2551461): a, c, g or t
  modified_base (2551507)..(2551508): a, c, g or t
  modified_base (2551511)..(2551513): a, c, g or t
  modified_base (2551543)..(2551551): a, c, g or t
  modified_base (2551557)..(2551559): a, c, g or t
  modified_base (2551578)..(2551579): a, c, g or t
  modified_base (2551632)..(2551633): a, c, g or t
  modified_base (2551638)..(2551667): a, c, g or t
  modified_base (2551669)..(2551670): a, c, g or t
  modified_base (2551695)..(2551784): a, c, g or t
  modified_base (2551800)..(2551800): a, c, g or t
  modified_base (2551826)..(2551840): a, c, g or t
  modified_base (2551864)..(2551864): a, c, g or t
  modified_base (2551867)..(2551868): a, c, g or t
  modified_base (2551886)..(2551887): a, c, g or t
  modified_base (2551940)..(2551941): a, c, g or t
  modified_base (2551943)..(2551944): a, c, g or t
  modified_base (2551947)..(2551950): a, c, g or t
  modified_base (2551969)..(2551990): a, c, g or t
  modified_base (2552015)..(2552021): a, c, g or t
  modified_base (2552024)..(2552025): a, c, g or t
  modified_base (2552042)..(2552050): a, c, g or t
  modified_base (2552174)..(2552174): a, c, g or t
  modified_base (2552203)..(2552203): a, c, g or t
  modified_base (2552257)..(2552257): a, c, g or t
  modified_base (2552270)..(2552270): a, c, g or t
  modified_base (2552304)..(2552305): a, c, g or t
  modified_base (2552309)..(2552310): a, c, g or t
  modified_base (2552314)..(2552315): a, c, g or t
  modified_base (2552317)..(2552371): a, c, g or t
  modified_base (2552410)..(2552410): a, c, g or t
  modified_base (2552414)..(2552414): a, c, g or t
  modified_base (2552436)..(2552438): a, c, g or t
  modified_base (2552474)..(2552474): a, c, g or t
  modified_base (2552492)..(2552492): a, c, g or t
  modified_base (2552514)..(2552514): a, c, g or t
  modified_base (2552581)..(2552581): a, c, g or t
  modified_base (2552674)..(2552674): a, c, g or t
  modified_base (2552719)..(2552719): a, c, g or t
  modified_base (2552740)..(2552740): a, c, g or t
  modified_base (2552968)..(2552968): a, c, g or t
  modified_base (2552973)..(2552975): a, c, g or t
  modified_base (2553106)..(2553111): a, c, g or t
  modified_base (2553115)..(2553162): a, c, g or t
  modified_base (2553203)..(2553206): a, c, g or t
  modified_base (2553209)..(2553209): a, c, g or t
  modified_base (2553318)..(2553422): a, c, g or t
  modified_base (2553446)..(2553446): a, c, g or t
  modified_base (2553471)..(2553471): a, c, g or t
  modified_base (2553482)..(2553520): a, c, g or t
  modified_base (2553593)..(2553602): a, c, g or t
  modified_base (2553609)..(2553610): a, c, g or t
  modified_base (2553655)..(2553700): a, c, g or t
  modified_base (2553750)..(2553750): a, c, g or t
  modified_base (2553770)..(2553773): a, c, g or t
  modified_base (2553783)..(2553787): a, c, g or t
  modified_base (2553872)..(2553872): a, c, g or t
  modified_base (2553877)..(2553878): a, c, g or t
  modified_base (2553917)..(2553920): a, c, g or t
  modified_base (2553925)..(2553942): a, c, g or t
  modified_base (2554019)..(2554021): a, c, g or t
  modified_base (2554109)..(2554109): a, c, g or t
  modified_base (2554116)..(2554135): a, c, g or t
  modified_base (2554193)..(2554230): a, c, g or t
  modified_base (2554324)..(2554330): a, c, g or t
  modified_base (2554334)..(2554335): a, c, g or t
  modified_base (2554422)..(2554422): a, c, g or t
  modified_base (2554427)..(2554429): a, c, g or t
  modified_base (2554616)..(2554617): a, c, g or t
  modified_base (2554629)..(2554629): a, c, g or t
  modified_base (2554665)..(2554666): a, c, g or t
  modified_base (2554673)..(2554697): a, c, g or t
  modified_base (2554709)..(2554710): a, c, g or t
  modified_base (2554721)..(2554733): a, c, g or t
  modified_base (2554749)..(2554750): a, c, g or t
  modified_base (2554779)..(2554781): a, c, g or t
  modified_base (2554783)..(2554783): a, c, g or t
  modified_base (2554795)..(2554795): a, c, g or t
  modified_base (2554878)..(2554878): a, c, g or t
  modified_base (2554965)..(2554965): a, c, g or t
  modified_base (2555022)..(2555029): a, c, g or t
  modified_base (2555055)..(2555055): a, c, g or t
  modified_base (2555058)..(2555058): a, c, g or t
  modified_base (2555166)..(2555166): a, c, g or t
  modified_base (2555175)..(2555175): a, c, g or t
  modified_base (2555392)..(2555395): a, c, g or t
  modified_base (2555402)..(2555445): a, c, g or t
  modified_base (2555528)..(2555572): a, c, g or t
  modified_base (2555598)..(2555598): a, c, g or t
  modified_base (2555621)..(2555621): a, c, g or t
  modified_base (2555630)..(2555630): a, c, g or t
  modified_base (2555637)..(2555637): a, c, g or t
  modified_base (2555754)..(2555754): a, c, g or t
  modified_base (2555757)..(2555757): a, c, g or t
  modified_base (2555779)..(2555822): a, c, g or t
  modified_base (2555824)..(2555824): a, c, g or t
  modified_base (2555854)..(2555854): a, c, g or t
  modified_base (2555873)..(2555914): a, c, g or t
  modified_base (2556000)..(2556002): a, c, g or t
  modified_base (2556161)..(2556167): a, c, g or t
  modified_base (2556273)..(2556273): a, c, g or t
  modified_base (2556276)..(2556374): a, c, g or t
  modified_base (2556506)..(2556508): a, c, g or t
  modified_base (2556703)..(2556703): a, c, g or t
  modified_base (2556758)..(2556758): a, c, g or t
  modified_base (2556768)..(2556768): a, c, g or t
  modified_base (2556793)..(2556857): a, c, g or t
  modified_base (2556884)..(2556937): a, c, g or t
  modified_base (2556943)..(2556943): a, c, g or t
  modified_base (2556953)..(2556954): a, c, g or t
  modified_base (2556965)..(2556966): a, c, g or t
  modified_base (2556973)..(2556973): a, c, g or t
  modified_base (2556982)..(2556982): a, c, g or t
  modified_base (2556985)..(2556986): a, c, g or t
  modified_base (2556993)..(2557001): a, c, g or t
  modified_base (2557030)..(2557074): a, c, g or t
  modified_base (2557140)..(2557246): a, c, g or t
  modified_base (2557249)..(2557250): a, c, g or t
  modified_base (2557331)..(2557331): a, c, g or t
  modified_base (2557344)..(2557345): a, c, g or t
  modified_base (2557349)..(2557350): a, c, g or t
  modified_base (2557358)..(2557424): a, c, g or t
  modified_base (2557501)..(2557502): a, c, g or t
  modified_base (2557595)..(2557730): a, c, g or t
  modified_base (2557744)..(2557744): a, c, g or t
  modified_base (2557760)..(2557780): a, c, g or t
  modified_base (2557835)..(2557841): a, c, g or t
  modified_base (2557844)..(2557844): a, c, g or t
  modified_base (2557866)..(2557867): a, c, g or t
  modified_base (2557913)..(2557913): a, c, g or t
  modified_base (2557928)..(2557928): a, c, g or t
  modified_base (2557946)..(2557947): a, c, g or t
  modified_base (2558002)..(2558002): a, c, g or t
  modified_base (2558048)..(2558089): a, c, g or t
  modified_base (2558117)..(2558117): a, c, g or t
  modified_base (2558125)..(2558139): a, c, g or t
  modified_base (2558192)..(2558233): a, c, g or t
  modified_base (2558245)..(2558245): a, c, g or t
  modified_base (2558319)..(2558321): a, c, g or t
  modified_base (2558323)..(2558323): a, c, g or t
  modified_base (2558338)..(2558338): a, c, g or t
  modified_base (2558375)..(2558417): a, c, g or t
  modified_base (2558445)..(2558445): a, c, g or t
  modified_base (2558499)..(2558550): a, c, g or t
  modified_base (2558594)..(2558595): a, c, g or t
  modified_base (2558599)..(2558601): a, c, g or t
  modified_base (2558603)..(2558648): a, c, g or t
  modified_base (2558650)..(2558651): a, c, g or t
  modified_base (2558662)..(2558662): a, c, g or t
  modified_base (2558669)..(2558707): a, c, g or t
  modified_base (2558753)..(2558793): a, c, g or t
  modified_base (2558894)..(2558894): a, c, g or t
  modified_base (2558903)..(2558946): a, c, g or t
  modified_base (2558971)..(2558971): a, c, g or t
  modified_base (2558973)..(2559014): a, c, g or t
  modified_base (2559062)..(2559101): a, c, g or t
  modified_base (2559151)..(2559151): a, c, g or t
  modified_base (2559193)..(2559196): a, c, g or t
  modified_base (2559348)..(2559352): a, c, g or t
  modified_base (2559355)..(2559392): a, c, g or t
  modified_base (2559394)..(2559394): a, c, g or t
  modified_base (2559421)..(2559421): a, c, g or t
  modified_base (2559442)..(2559483): a, c, g or t
  modified_base (2559509)..(2559512): a, c, g or t
  modified_base (2559518)..(2559576): a, c, g or t
  modified_base (2559606)..(2559608): a, c, g or t
  modified_base (2559612)..(2559655): a, c, g or t
  modified_base (2559712)..(2559753): a, c, g or t
  modified_base (2559774)..(2559813): a, c, g or t
  modified_base (2559861)..(2559861): a, c, g or t
  modified_base (2559952)..(2559952): a, c, g or t
  modified_base (2559961)..(2560000): a, c, g or t
  modified_base (2560223)..(2560224): a, c, g or t
  modified_base (2560226)..(2560227): a, c, g or t
  modified_base (2560229)..(2560281): a, c, g or t
  modified_base (2560304)..(2560345): a, c, g or t
  modified_base (2560348)..(2560348): a, c, g or t
  modified_base (2560376)..(2560420): a, c, g or t
  modified_base (2560479)..(2560520): a, c, g or t
  modified_base (2560657)..(2560662): a, c, g or t
  modified_base (2561599)..(2561600): a, c, g or t
  modified_base (2561992)..(2561995): a, c, g or t
  modified_base (2561997)..(2561998): a, c, g or t
  modified_base (2562007)..(2562008): a, c, g or t
  modified_base (2562012)..(2562013): a, c, g or t
  modified_base (2562188)..(2562188): a, c, g or t
  modified_base (2562193)..(2562232): a, c, g or t
  modified_base (2562876)..(2562877): a, c, g or t
  modified_base (2562996)..(2563035): a, c, g or t
  modified_base (2563204)..(2563250): a, c, g or t
  modified_base (2563325)..(2563329): a, c, g or t
  modified_base (2563365)..(2563406): a, c, g or t
  modified_base (2563426)..(2563466): a, c, g or t
  modified_base (2563512)..(2563512): a, c, g or t
  modified_base (2563519)..(2563559): a, c, g or t
  modified_base (2563563)..(2563563): a, c, g or t
  modified_base (2563588)..(2563627): a, c, g or t
  modified_base (2563658)..(2563697): a, c, g or t
  modified_base (2563814)..(2563817): a, c, g or t
  modified_base (2563938)..(2563946): a, c, g or t
  modified_base (2563949)..(2563952): a, c, g or t
  modified_base (2564003)..(2564006): a, c, g or t
  modified_base (2564014)..(2564079): a, c, g or t
  modified_base (2564203)..(2564242): a, c, g or t
  modified_base (2564264)..(2564313): a, c, g or t
  modified_base (2564343)..(2564346): a, c, g or t
  modified_base (2564382)..(2564383): a, c, g or t
  modified_base (2564387)..(2564396): a, c, g or t
  modified_base (2564441)..(2564491): a, c, g or t
  modified_base (2564524)..(2564565): a, c, g or t
  modified_base (2564611)..(2564652): a, c, g or t
  modified_base (2564658)..(2564660): a, c, g or t
  modified_base (2564676)..(2564677): a, c, g or t
  modified_base (2564778)..(2564836): a, c, g or t
  modified_base (2564903)..(2564951): a, c, g or t
  modified_base (2564953)..(2564954): a, c, g or t
  modified_base (2564973)..(2565039): a, c, g or t
  modified_base (2565081)..(2565082): a, c, g or t
  modified_base (2565115)..(2565115): a, c, g or t
  modified_base (2565143)..(2565145): a, c, g or t
  modified_base (2565148)..(2565149): a, c, g or t
  modified_base (2565166)..(2565175): a, c, g or t
  modified_base (2565202)..(2565249): a, c, g or t
  modified_base (2565287)..(2565326): a, c, g or t
  modified_base (2565362)..(2565363): a, c, g or t
  modified_base (2565371)..(2565433): a, c, g or t
  modified_base (2565461)..(2565461): a, c, g or t
  modified_base (2565470)..(2565474): a, c, g or t
  modified_base (2565517)..(2565561): a, c, g or t
  modified_base (2565612)..(2572472): a, c, g or t
  modified_base (2572475)..(2572475): a, c, g or t
  modified_base (2572541)..(2572554): a, c, g or t
  modified_base (2572565)..(2572566): a, c, g or t
  modified_base (2572594)..(2572665): a, c, g or t
  modified_base (2572709)..(2572710): a, c, g or t
  modified_base (2572712)..(2572787): a, c, g or t
  modified_base (2572810)..(2572811): a, c, g or t
  modified_base (2572855)..(2572894): a, c, g or t
  modified_base (2572918)..(2572966): a, c, g or t
  modified_base (2572976)..(2572976): a, c, g or t
  modified_base (2572994)..(2573011): a, c, g or t
  modified_base (2573025)..(2573026): a, c, g or t
  modified_base (2573060)..(2573077): a, c, g or t
  modified_base (2573116)..(2573118): a, c, g or t
  modified_base (2573123)..(2573123): a, c, g or t
  modified_base (2573149)..(2573214): a, c, g or t
  modified_base (2573238)..(2573314): a, c, g or t
  modified_base (2573316)..(2573316): a, c, g or t
  modified_base (2573347)..(2573403): a, c, g or t
  modified_base (2573482)..(2573484): a, c, g or t
  modified_base (2573573)..(2573573): a, c, g or t
  modified_base (2573587)..(2573587): a, c, g or t
  modified_base (2573589)..(2573590): a, c, g or t
  modified_base (2573621)..(2573621): a, c, g or t
  modified_base (2573652)..(2573652): a, c, g or t
  modified_base (2573662)..(2573662): a, c, g or t
  modified_base (2573667)..(2573667): a, c, g or t
  modified_base (2573674)..(2573674): a, c, g or t
  modified_base (2573770)..(2573770): a, c, g or t
  modified_base (2573803)..(2573806): a, c, g or t
  modified_base (2573854)..(2573858): a, c, g or t
  modified_base (2573892)..(2573937): a, c, g or t
  modified_base (2573943)..(2573943): a, c, g or t
  modified_base (2573957)..(2573966): a, c, g or t
  modified_base (2573980)..(2573980): a, c, g or t
  modified_base (2574111)..(2574156): a, c, g or t
  modified_base (2574204)..(2574204): a, c, g or t
  modified_base (2574207)..(2574208): a, c, g or t
  modified_base (2574220)..(2574248): a, c, g or t
  modified_base (2574292)..(2574353): a, c, g or t
  modified_base (2574405)..(2574405): a, c, g or t
  modified_base (2574432)..(2574474): a, c, g or t
  modified_base (2574482)..(2574482): a, c, g or t
  modified_base (2574533)..(2574533): a, c, g or t
  modified_base (2574548)..(2574548): a, c, g or t
  modified_base (2574557)..(2574557): a, c, g or t
  modified_base (2574583)..(2574620): a, c, g or t
  modified_base (2574629)..(2574629): a, c, g or t
  modified_base (2574641)..(2574682): a, c, g or t
  modified_base (2574727)..(2574777): a, c, g or t
  modified_base (2574827)..(2574827): a, c, g or t
  modified_base (2574846)..(2574846): a, c, g or t
  modified_base (2574901)..(2574940): a, c, g or t
  modified_base (2574968)..(2574968): a, c, g or t
  modified_base (2575019)..(2575020): a, c, g or t
  modified_base (2575115)..(2575155): a, c, g or t
  modified_base (2575205)..(2575208): a, c, g or t
  modified_base (2575336)..(2575377): a, c, g or t
  modified_base (2575444)..(2575487): a, c, g or t
  modified_base (2575593)..(2575593): a, c, g or t
  modified_base (2575685)..(2575726): a, c, g or t
  modified_base (2575803)..(2575842): a, c, g or t
  modified_base (2575945)..(2575948): a, c, g or t
  modified_base (2575954)..(2575957): a, c, g or t
  modified_base (2575981)..(2576022): a, c, g or t
  modified_base (2576051)..(2576051): a, c, g or t
  modified_base (2576192)..(2576198): a, c, g or t
  modified_base (2576200)..(2576232): a, c, g or t
  modified_base (2576240)..(2576241): a, c, g or t
  modified_base (2576308)..(2576351): a, c, g or t
  modified_base (2576403)..(2576416): a, c, g or t
  modified_base (2576444)..(2576444): a, c, g or t
  modified_base (2576448)..(2576485): a, c, g or t
  modified_base (2576786)..(2576802): a, c, g or t
  modified_base (2576885)..(2576885): a, c, g or t
  modified_base (2576918)..(2576966): a, c, g or t
  modified_base (2576972)..(2576973): a, c, g or t
  modified_base (2576983)..(2576983): a, c, g or t
  modified_base (2576989)..(2576991): a, c, g or t
  modified_base (2577002)..(2577002): a, c, g or t
  modified_base (2577065)..(2577065): a, c, g or t
  modified_base (2577092)..(2577092): a, c, g or t
  modified_base (2577223)..(2577223): a, c, g or t
  modified_base (2577281)..(2577282): a, c, g or t
  modified_base (2577353)..(2577353): a, c, g or t
  modified_base (2577356)..(2577394): a, c, g or t
  modified_base (2577405)..(2577408): a, c, g or t
  modified_base (2577418)..(2577490): a, c, g or t
  modified_base (2577502)..(2577502): a, c, g or t
  modified_base (2577605)..(2577656): a, c, g or t
  modified_base (2577720)..(2577761): a, c, g or t
  modified_base (2577789)..(2577793): a, c, g or t
  modified_base (2577812)..(2577813): a, c, g or t
  modified_base (2577816)..(2577820): a, c, g or t
  modified_base (2577822)..(2577867): a, c, g or t
  modified_base (2577879)..(2577880): a, c, g or t
  modified_base (2577939)..(2577998): a, c, g or t
  modified_base (2578029)..(2578033): a, c, g or t
  modified_base (2578077)..(2578121): a, c, g or t
  modified_base (2578179)..(2578220): a, c, g or t
  modified_base (2578244)..(2578388): a, c, g or t
  modified_base (2578414)..(2578453): a, c, g or t
  modified_base (2578474)..(2578513): a, c, g or t
  modified_base (2578553)..(2578553): a, c, g or t
  modified_base (2578589)..(2578589): a, c, g or t
  modified_base (2578610)..(2578613): a, c, g or t
  modified_base (2578660)..(2578663): a, c, g or t
  modified_base (2578691)..(2578691): a, c, g or t
  modified_base (2578723)..(2578762): a, c, g or t
  modified_base (2578794)..(2578834): a, c, g or t
  modified_base (2578979)..(2578979): a, c, g or t
  modified_base (2579009)..(2579048): a, c, g or t
  modified_base (2579053)..(2579053): a, c, g or t
  modified_base (2579210)..(2579210): a, c, g or t
  modified_base (2579235)..(2579235): a, c, g or t
  modified_base (2579237)..(2579277): a, c, g or t
  modified_base (2579327)..(2579366): a, c, g or t
  modified_base (2579390)..(2579431): a, c, g or t
  modified_base (2579521)..(2579521): a, c, g or t
  modified_base (2579619)..(2579656): a, c, g or t
  modified_base (2579676)..(2579722): a, c, g or t
  modified_base (2579751)..(2579751): a, c, g or t
  modified_base (2579778)..(2579816): a, c, g or t
  modified_base (2579908)..(2579947): a, c, g or t
  modified_base (2579968)..(2580009): a, c, g or t
  modified_base (2580084)..(2580123): a, c, g or t
  modified_base (2580174)..(2580174): a, c, g or t
  modified_base (2580178)..(2580220): a, c, g or t
  modified_base (2580319)..(2580356): a, c, g or t
  modified_base (2580380)..(2580422): a, c, g or t
  modified_base (2580460)..(2580460): a, c, g or t
  modified_base (2580559)..(2580598): a, c, g or t
  modified_base (2580703)..(2580706): a, c, g or t
  modified_base (2580751)..(2580793): a, c, g or t
  modified_base (2580838)..(2580838): a, c, g or t
  modified_base (2581117)..(2581156): a, c, g or t
  modified_base (2581246)..(2581287): a, c, g or t
  modified_base (2581947)..(2581953): a, c, g or t
  modified_base (2582276)..(2582277): a, c, g or t
  modified_base (2582287)..(2582288): a, c, g or t
  modified_base (2583843)..(2583844): a, c, g or t
  modified_base (2583846)..(2583848): a, c, g or t
  modified_base (2583914)..(2583915): a, c, g or t
  modified_base (2583917)..(2583919): a, c, g or t
  modified_base (2583921)..(2583924): a, c, g or t
  modified_base (2583956)..(2583957): a, c, g or t
  modified_base (2583963)..(2583971): a, c, g or t
  modified_base (2584038)..(2584059): a, c, g or t
  modified_base (2584061)..(2584064): a, c, g or t
  modified_base (2584083)..(2584134): a, c, g or t
  modified_base (2584164)..(2584167): a, c, g or t
  modified_base (2584231)..(2584232): a, c, g or t
  modified_base (2584236)..(2584237): a, c, g or t
  modified_base (2584239)..(2584240): a, c, g or t
  modified_base (2584271)..(2584288): a, c, g or t
  modified_base (2584330)..(2584343): a, c, g or t
  modified_base (2584366)..(2584399): a, c, g or t
  modified_base (2584420)..(2584421): a, c, g or t
  modified_base (2584423)..(2584426): a, c, g or t
  modified_base (2584429)..(2584429): a, c, g or t
  modified_base (2584445)..(2584446): a, c, g or t
  modified_base (2584450)..(2585393): a, c, g or t
  modified_base (2585398)..(2585400): a, c, g or t
  modified_base (2585409)..(2585410): a, c, g or t
  modified_base (2585417)..(2585463): a, c, g or t
  modified_base (2585465)..(2585466): a, c, g or t
  modified_base (2585487)..(2585859): a, c, g or t
  modified_base (2585868)..(2585869): a, c, g or t
  modified_base (2585871)..(2585872): a, c, g or t
  modified_base (2585883)..(2586004): a, c, g or t
  modified_base (2586025)..(2586026): a, c, g or t
  modified_base (2586028)..(2586036): a, c, g or t
  modified_base (2586060)..(2586096): a, c, g or t
  modified_base (2586098)..(2586099): a, c, g or t
  modified_base (2586114)..(2586115): a, c, g or t
  modified_base (2586120)..(2586153): a, c, g or t
  modified_base (2586207)..(2586223): a, c, g or t
  modified_base (2586227)..(2586228): a, c, g or t
  modified_base (2586230)..(2586231): a, c, g or t
  modified_base (2586236)..(2586237): a, c, g or t
  modified_base (2586245)..(2586248): a, c, g or t
  modified_base (2586272)..(2586497): a, c, g or t
  modified_base (2586511)..(2586512): a, c, g or t
  modified_base (2586521)..(2586647): a, c, g or t
  modified_base (2586671)..(2586738): a, c, g or t
  modified_base (2586740)..(2586741): a, c, g or t
  modified_base (2586761)..(2587455): a, c, g or t
  modified_base (2587479)..(2587864): a, c, g or t
  modified_base (2587866)..(2587867): a, c, g or t
  modified_base (2587888)..(2588080): a, c, g or t
  modified_base (2588082)..(2588083): a, c, g or t
  modified_base (2588085)..(2588085): a, c, g or t
  modified_base (2588104)..(2588147): a, c, g or t
  modified_base (2588171)..(2588342): a, c, g or t
  modified_base (2588351)..(2588354): a, c, g or t
  modified_base (2588366)..(2588397): a, c, g or t
  modified_base (2588402)..(2588402): a, c, g or t
  modified_base (2588421)..(2588485): a, c, g or t
  modified_base (2588514)..(2588518): a, c, g or t
  modified_base (2588523)..(2588524): a, c, g or t
  modified_base (2588545)..(2588545): a, c, g or t
  modified_base (2588547)..(2588548): a, c, g or t
  modified_base (2588552)..(2588555): a, c, g or t
  modified_base (2588557)..(2588570): a, c, g or t
  modified_base (2588603)..(2588609): a, c, g or t
  modified_base (2588611)..(2588612): a, c, g or t
  modified_base (2588615)..(2588616): a, c, g or t
  modified_base (2588643)..(2588697): a, c, g or t
  modified_base (2588755)..(2588755): a, c, g or t
  modified_base (2588802)..(2588842): a, c, g or t
  modified_base (2588949)..(2588952): a, c, g or t
  modified_base (2589014)..(2589053): a, c, g or t
  modified_base (2589098)..(2589098): a, c, g or t
  modified_base (2589107)..(2589107): a, c, g or t
  modified_base (2589133)..(2589134): a, c, g or t
  modified_base (2589136)..(2589175): a, c, g or t
  modified_base (2589824)..(2589832): a, c, g or t
  modified_base (2590717)..(2590717): a, c, g or t
  modified_base (2591269)..(2591269): a, c, g or t
  modified_base (2591496)..(2591498): a, c, g or t
  modified_base (2591858)..(2591862): a, c, g or t
  modified_base (2592266)..(2592266): a, c, g or t
  modified_base (2595465)..(2595465): a, c, g or t
  modified_base (2595887)..(2595887): a, c, g or t
  modified_base (2596133)..(2596136): a, c, g or t
  modified_base (2597686)..(2597686): a, c, g or t
  modified_base (2600297)..(2600300): a, c, g or t
  modified_base (2600698)..(2600698): a, c, g or t
  modified_base (2601344)..(2601347): a, c, g or t
  modified_base (2602650)..(2602650): a, c, g or t
  modified_base (2603784)..(2603784): a, c, g or t
  modified_base (2604546)..(2604546): a, c, g or t
  modified_base (2604621)..(2604621): a, c, g or t
  modified_base (2604735)..(2604735): a, c, g or t
  modified_base (2605398)..(2605398): a, c, g or t
  modified_base (2605651)..(2605651): a, c, g or t
  modified_base (2606680)..(2606680): a, c, g or t
  modified_base (2607538)..(2607538): a, c, g or t
  modified_base (2607545)..(2607545): a, c, g or t
  modified_base (2607887)..(2607887): a, c, g or t
  modified_base (2608235)..(2608238): a, c, g or t
  modified_base (2612712)..(2612712): a, c, g or t
  modified_base (2615293)..(2615293): a, c, g or t
  modified_base (2615874)..(2615874): a, c, g or t
  modified_base (2616178)..(2616178): a, c, g or t
  modified_base (2616264)..(2616271): a, c, g or t
  modified_base (2616937)..(2616937): a, c, g or t
  modified_base (2619084)..(2619084): a, c, g or t
  modified_base (2620102)..(2620102): a, c, g or t
  modified_base (2620104)..(2620105): a, c, g or t
  modified_base (2620125)..(2620126): a, c, g or t
  modified_base (2620313)..(2620313): a, c, g or t
  modified_base (2620998)..(2620998): a, c, g or t
  modified_base (2621461)..(2621461): a, c, g or t
  modified_base (2622781)..(2622784): a, c, g or t
  modified_base (2623968)..(2623971): a, c, g or t
  modified_base (2624056)..(2624060): a, c, g or t
  modified_base (2624064)..(2624064): a, c, g or t
  modified_base (2625919)..(2625927): a, c, g or t
  modified_base (2627617)..(2627617): a, c, g or t
  modified_base (2628955)..(2628955): a, c, g or t
  modified_base (2631808)..(2631808): a, c, g or t
  modified_base (2634102)..(2634108): a, c, g or t
  modified_base (2634126)..(2634126): a, c, g or t
  modified_base (2634475)..(2634475): a, c, g or t
  modified_base (2634996)..(2634996): a, c, g or t
  modified_base (2635588)..(2635588): a, c, g or t
  modified_base (2635685)..(2635685): a, c, g or t
  modified_base (2638818)..(2638818): a, c, g or t
  modified_base (2641438)..(2641439): a, c, g or t
  modified_base (2641442)..(2641442): a, c, g or t
  modified_base (2641693)..(2641693): a, c, g or t
  modified_base (2641700)..(2641701): a, c, g or t
  modified_base (2646238)..(2646238): a, c, g or t
  modified_base (2653096)..(2653096): a, c, g or t
  modified_base (2653412)..(2653415): a, c, g or t
  modified_base (2654095)..(2654100): a, c, g or t
  modified_base (2655196)..(2655196): a, c, g or t
  modified_base (2657335)..(2657335): a, c, g or t
  modified_base (2658189)..(2658189): a, c, g or t
  modified_base (2658679)..(2658679): a, c, g or t
  modified_base (2660753)..(2660753): a, c, g or t
  modified_base (2660845)..(2660845): a, c, g or t
  modified_base (2662287)..(2662287): a, c, g or t
  modified_base (2663867)..(2663867): a, c, g or t
  modified_base (2665769)..(2665770): a, c, g or t
  modified_base (2666365)..(2666365): a, c, g or t
  modified_base (2667092)..(2667095): a, c, g or t
  modified_base (2669279)..(2669279): a, c, g or t
  modified_base (2671111)..(2671111): a, c, g or t
  modified_base (2672465)..(2672468): a, c, g or t
  modified_base (2673824)..(2673824): a, c, g or t
  modified_base (2674550)..(2674553): a, c, g or t
  modified_base (2675028)..(2675034): a, c, g or t
  modified_base (2677550)..(2677550): a, c, g or t
  modified_base (2677807)..(2677807): a, c, g or t
  modified_base (2678761)..(2678761): a, c, g or t
  modified_base (2679936)..(2679936): a, c, g or t
  modified_base (2680399)..(2680399): a, c, g or t
  modified_base (2680448)..(2680448): a, c, g or t
  modified_base (2681185)..(2681185): a, c, g or t
  modified_base (2682659)..(2682666): a, c, g or t
  modified_base (2683174)..(2683174): a, c, g or t
  modified_base (2684221)..(2684221): a, c, g or t
  modified_base (2687017)..(2687017): a, c, g or t
  modified_base (2688299)..(2688302): a, c, g or t
  modified_base (2688304)..(2688305): a, c, g or t
  modified_base (2688407)..(2688407): a, c, g or t
  modified_base (2694913)..(2694916): a, c, g or t
  modified_base (2696249)..(2696249): a, c, g or t
  modified_base (2696633)..(2696638): a, c, g or t
  modified_base (2698225)..(2698225): a, c, g or t
  modified_base (2699078)..(2699078): a, c, g or t
  modified_base (2700464)..(2700464): a, c, g or t
  modified_base (2702574)..(2702574): a, c, g or t
  modified_base (2702781)..(2702781): a, c, g or t
  modified_base (2703230)..(2703230): a, c, g or t
  modified_base (2703499)..(2703499): a, c, g or t
  modified_base (2703769)..(2703769): a, c, g or t
  modified_base (2704716)..(2704717): a, c, g or t
  modified_base (2704727)..(2704732): a, c, g or t
  modified_base (2705434)..(2705439): a, c, g or t
  modified_base (2706235)..(2706235): a, c, g or t
  modified_base (2706255)..(2706255): a, c, g or t
  modified_base (2708264)..(2708269): a, c, g or t
  modified_base (2708440)..(2708440): a, c, g or t
  modified_base (2709083)..(2709083): a, c, g or t
  modified_base (2709713)..(2709713): a, c, g or t
  modified_base (2710868)..(2710868): a, c, g or t
  modified_base (2711820)..(2711823): a, c, g or t
  modified_base (2712885)..(2712885): a, c, g or t
  modified_base (2713039)..(2713039): a, c, g or t
  modified_base (2713109)..(2713109): a, c, g or t
  modified_base (2713877)..(2713877): a, c, g or t
  modified_base (2716801)..(2716801): a, c, g or t
  modified_base (2717060)..(2717060): a, c, g or t
  modified_base (2717089)..(2717089): a, c, g or t
  modified_base (2722378)..(2722380): a, c, g or t
  modified_base (2722382)..(2722384): a, c, g or t
  modified_base (2726426)..(2726431): a, c, g or t
  modified_base (2726522)..(2726530): a, c, g or t
  modified_base (2726812)..(2726812): a, c, g or t
  modified_base (2729726)..(2729726): a, c, g or t
  modified_base (2730828)..(2730828): a, c, g or t
  modified_base (2731400)..(2731400): a, c, g or t
  modified_base (2731404)..(2731405): a, c, g or t
  modified_base (2731780)..(2731780): a, c, g or t
  modified_base (2732206)..(2732214): a, c, g or t
  modified_base (2732396)..(2732399): a, c, g or t
  modified_base (2734412)..(2734412): a, c, g or t
  modified_base (2734445)..(2734445): a, c, g or t
  modified_base (2736492)..(2736492): a, c, g or t
  modified_base (2742150)..(2742150): a, c, g or t
  modified_base (2743416)..(2743417): a, c, g or t
  modified_base (2743453)..(2743461): a, c, g or t
  modified_base (2744118)..(2744118): a, c, g or t
  modified_base (2744224)..(2744224): a, c, g or t
  modified_base (2746051)..(2746051): a, c, g or t
  modified_base (2748517)..(2748517): a, c, g or t
  modified_base (2751669)..(2751669): a, c, g or t
  modified_base (2752653)..(2752653): a, c, g or t
  modified_base (2753603)..(2753603): a, c, g or t
  modified_base (2754306)..(2754306): a, c, g or t
  modified_base (2754441)..(2754441): a, c, g or t
  modified_base (2754732)..(2754735): a, c, g or t
  modified_base (2755397)..(2755397): a, c, g or t
  modified_base (2755796)..(2755796): a, c, g or t
  modified_base (2755838)..(2755838): a, c, g or t
  modified_base (2755898)..(2755898): a, c, g or t
  modified_base (2756067)..(2756067): a, c, g or t
  modified_base (2756070)..(2756070): a, c, g or t
  modified_base (2757202)..(2757202): a, c, g or t
  modified_base (2757258)..(2757258): a, c, g or t
  modified_base (2758260)..(2758260): a, c, g or t
  modified_base (2759762)..(2759769): a, c, g or t
  modified_base (2760370)..(2760370): a, c, g or t
  modified_base (2762701)..(2762701): a, c, g or t
  modified_base (2763400)..(2763400): a, c, g or t
  modified_base (2763756)..(2763756): a, c, g or t
  modified_base (2765927)..(2765927): a, c, g or t
  modified_base (2772324)..(2772324): a, c, g or t
  modified_base (2772328)..(2772330): a, c, g or t
  modified_base (2773642)..(2773642): a, c, g or t
  modified_base (2774083)..(2774083): a, c, g or t
  modified_base (2775077)..(2775077): a, c, g or t
  modified_base (2775080)..(2775080): a, c, g or t
  modified_base (2775609)..(2775609): a, c, g or t
  modified_base (2776064)..(2776067): a, c, g or t
  modified_base (2777691)..(2777691): a, c, g or t
  modified_base (2778192)..(2778192): a, c, g or t
  modified_base (2778936)..(2778936): a, c, g or t
  modified_base (2782999)..(2782999): a, c, g or t
  modified_base (2783491)..(2783491): a, c, g or t
  modified_base (2784049)..(2784049): a, c, g or t
  modified_base (2786184)..(2786184): a, c, g or t
  modified_base (2787283)..(2787283): a, c, g or t
  modified_base (2787285)..(2787285): a, c, g or t
  modified_base (2789274)..(2789274): a, c, g or t
  modified_base (2791452)..(2791452): a, c, g or t
  modified_base (2792787)..(2792787): a, c, g or t
  modified_base (2794972)..(2794972): a, c, g or t
  modified_base (2797100)..(2797100): a, c, g or t
  modified_base (2798129)..(2798129): a, c, g or t
  modified_base (2798149)..(2798149): a, c, g or t
  modified_base (2798204)..(2798204): a, c, g or t
  modified_base (2798446)..(2798446): a, c, g or t
  modified_base (2799861)..(2799861): a, c, g or t
  modified_base (2804375)..(2804380): a, c, g or t
  modified_base (2804382)..(2804383): a, c, g or t
  modified_base (2804388)..(2804389): a, c, g or t
  modified_base (2804406)..(2804406): a, c, g or t
  modified_base (2804410)..(2804415): a, c, g or t
  modified_base (2804466)..(2804478): a, c, g or t
  modified_base (2804488)..(2804491): a, c, g or t
  modified_base (2804503)..(2804504): a, c, g or t
  modified_base (2804517)..(2804574): a, c, g or t
  modified_base (2804576)..(2804576): a, c, g or t
  modified_base (2804661)..(2804665): a, c, g or t
  modified_base (2804672)..(2804673): a, c, g or t
  modified_base (2804676)..(2804677): a, c, g or t
  modified_base (2805020)..(2805020): a, c, g or t
  modified_base (2805950)..(2805950): a, c, g or t
  modified_base (2806135)..(2806142): a, c, g or t
  modified_base (2807875)..(2807882): a, c, g or t
  modified_base (2807886)..(2807886): a, c, g or t
  modified_base (2809471)..(2809471): a, c, g or t
  modified_base (2809905)..(2809905): a, c, g or t
  modified_base (2810399)..(2810399): a, c, g or t
  modified_base (2810985)..(2810985): a, c, g or t
  modified_base (2813645)..(2813645): a, c, g or t
  modified_base (2813809)..(2813809): a, c, g or t
  modified_base (2814445)..(2814445): a, c, g or t
  modified_base (2815006)..(2815006): a, c, g or t
  modified_base (2815025)..(2815033): a, c, g or t
  modified_base (2815035)..(2815036): a, c, g or t
  modified_base (2819401)..(2819401): a, c, g or t
  modified_base (2820034)..(2820034): a, c, g or t
  modified_base (2820210)..(2820210): a, c, g or t
  modified_base (2820684)..(2820685): a, c, g or t
  modified_base (2820825)..(2820825): a, c, g or t
  modified_base (2822462)..(2822462): a, c, g or t
  modified_base (2822961)..(2822961): a, c, g or t
  modified_base (2826201)..(2826201): a, c, g or t
  modified_base (2826865)..(2826869): a, c, g or t
  modified_base (2826879)..(2826879): a, c, g or t
  modified_base (2827136)..(2827136): a, c, g or t
  modified_base (2828268)..(2828268): a, c, g or t
  modified_base (2828867)..(2828867): a, c, g or t
  modified_base (2833078)..(2833078): a, c, g or t
  modified_base (2833513)..(2833513): a, c, g or t
  modified_base (2836821)..(2836823): a, c, g or t
  modified_base (2839300)..(2839300): a, c, g or t
  modified_base (2840544)..(2840545): a, c, g or t
  modified_base (2842198)..(2842200): a, c, g or t
  modified_base (2844250)..(2844250): a, c, g or t
  modified_base (2847565)..(2847570): a, c, g or t
  modified_base (2850212)..(2850212): a, c, g or t
  modified_base (2851535)..(2851539): a, c, g or t
  modified_base (2851541)..(2851541): a, c, g or t
  modified_base (2851570)..(2851575): a, c, g or t
  modified_base (2851798)..(2851798): a, c, g or t
  modified_base (2851803)..(2851806): a, c, g or t
  modified_base (2851809)..(2851812): a, c, g or t
  modified_base (2852153)..(2852153): a, c, g or t
  modified_base (2853965)..(2853971): a, c, g or t
  modified_base (2853974)..(2853974): a, c, g or t
  modified_base (2854621)..(2854621): a, c, g or t
  modified_base (2857271)..(2857271): a, c, g or t
  modified_base (2857294)..(2857294): a, c, g or t
  modified_base (2857553)..(2857553): a, c, g or t
  modified_base (2859305)..(2859305): a, c, g or t
  modified_base (2859310)..(2859310): a, c, g or t
  modified_base (2859312)..(2859312): a, c, g or t
  modified_base (2859328)..(2859336): a, c, g or t
  modified_base (2859576)..(2859576): a, c, g or t
  modified_base (2859578)..(2859579): a, c, g or t
  modified_base (2860422)..(2860422): a, c, g or t
  modified_base (2861302)..(2861302): a, c, g or t
  modified_base (2863773)..(2863776): a, c, g or t
  modified_base (2864868)..(2864868): a, c, g or t
  modified_base (2866097)..(2866106): a, c, g or t
  modified_base (2866888)..(2866889): a, c, g or t
  modified_base (2866891)..(2866894): a, c, g or t
  modified_base (2867399)..(2867400): a, c, g or t
  modified_base (2867541)..(2867544): a, c, g or t
  modified_base (2867640)..(2867640): a, c, g or t
  modified_base (2867897)..(2867897): a, c, g or t
  modified_base (2869084)..(2869084): a, c, g or t
  modified_base (2869515)..(2869515): a, c, g or t
  modified_base (2869557)..(2869557): a, c, g or t
  modified_base (2869559)..(2869562): a, c, g or t
  modified_base (2870943)..(2870949): a, c, g or t
  modified_base (2871053)..(2871053): a, c, g or t
  modified_base (2873884)..(2873884): a, c, g or t
  modified_base (2873893)..(2873893): a, c, g or t
  modified_base (2873901)..(2873901): a, c, g or t
  modified_base (2874892)..(2874892): a, c, g or t
  modified_base (2876699)..(2876699): a, c, g or t
  modified_base (2876935)..(2876935): a, c, g or t
  modified_base (2878240)..(2878240): a, c, g or t
  modified_base (2880484)..(2880487): a, c, g or t
  modified_base (2880731)..(2880733): a, c, g or t
  modified_base (2883312)..(2883312): a, c, g or t
  modified_base (2883988)..(2883988): a, c, g or t
  modified_base (2887118)..(2887118): a, c, g or t
  modified_base (2887120)..(2887120): a, c, g or t
  modified_base (2889782)..(2889782): a, c, g or t
  modified_base (2890479)..(2890479): a, c, g or t
  modified_base (2892610)..(2892616): a, c, g or t
  modified_base (2893435)..(2893435): a, c, g or t
  modified_base (2893589)..(2893589): a, c, g or t
  modified_base (2894266)..(2894266): a, c, g or t
  modified_base (2896564)..(2896564): a, c, g or t
  modified_base (2896828)..(2896829): a, c, g or t
  modified_base (2896922)..(2896955): a, c, g or t
  modified_base (2897076)..(2897077): a, c, g or t
  modified_base (2900124)..(2900124): a, c, g or t
  modified_base (2900958)..(2900958): a, c, g or t
  modified_base (2901057)..(2901057): a, c, g or t
  modified_base (2901059)..(2901059): a, c, g or t
  modified_base (2901061)..(2901061): a, c, g or t
  modified_base (2901063)..(2901063): a, c, g or t
  modified_base (2902092)..(2902092): a, c, g or t
  modified_base (2902176)..(2902176): a, c, g or t
  modified_base (2902277)..(2902277): a, c, g or t
  modified_base (2902698)..(2902698): a, c, g or t
  modified_base (2903115)..(2903115): a, c, g or t
  modified_base (2906012)..(2906012): a, c, g or t
  modified_base (2906186)..(2906186): a, c, g or t
  modified_base (2908061)..(2908061): a, c, g or t
  modified_base (2908064)..(2908065): a, c, g or t
  modified_base (2908172)..(2908176): a, c, g or t
  modified_base (2908599)..(2908599): a, c, g or t
  modified_base (2909763)..(2909763): a, c, g or t
  modified_base (2911931)..(2911931): a, c, g or t
  modified_base (2912534)..(2912534): a, c, g or t
  modified_base (2913325)..(2913325): a, c, g or t
  modified_base (2916701)..(2916701): a, c, g or t
  modified_base (2917943)..(2917950): a, c, g or t
  modified_base (2920731)..(2920731): a, c, g or t
  modified_base (2922942)..(2922942): a, c, g or t
  modified_base (2923759)..(2923762): a, c, g or t
  modified_base (2924303)..(2924303): a, c, g or t
  modified_base (2927446)..(2927446): a, c, g or t
  modified_base (2927452)..(2927452): a, c, g or t
  modified_base (2929577)..(2929580): a, c, g or t
  modified_base (2931376)..(2931376): a, c, g or t
  modified_base (2931384)..(2931387): a, c, g or t
  modified_base (2931697)..(2931697): a, c, g or t
  modified_base (2934773)..(2934776): a, c, g or t
  modified_base (2934778)..(2934783): a, c, g or t
  modified_base (2936438)..(2936447): a, c, g or t
  modified_base (2936481)..(2936494): a, c, g or t
  modified_base (2938390)..(2938390): a, c, g or t
  modified_base (2940912)..(2940913): a, c, g or t
  modified_base (2941122)..(2941122): a, c, g or t
  modified_base (2941278)..(2941278): a, c, g or t
  modified_base (2941280)..(2941280): a, c, g or t
  modified_base (2943148)..(2943150): a, c, g or t
  modified_base (2943407)..(2943407): a, c, g or t
  modified_base (2943467)..(2943467): a, c, g or t
  modified_base (2947421)..(2947421): a, c, g or t
  modified_base (2949192)..(2949197): a, c, g or t
  modified_base (2950518)..(2950518): a, c, g or t
  modified_base (2951824)..(2951826): a, c, g or t
  modified_base (2951828)..(2951830): a, c, g or t
  modified_base (2952784)..(2952784): a, c, g or t
  modified_base (2954892)..(2954892): a, c, g or t
  modified_base (2955921)..(2955926): a, c, g or t
  modified_base (2956019)..(2956019): a, c, g or t
  modified_base (2956217)..(2956217): a, c, g or t
  modified_base (2957560)..(2957560): a, c, g or t
  modified_base (2957562)..(2957562): a, c, g or t
  modified_base (2958589)..(2958589): a, c, g or t
  modified_base (2961322)..(2961322): a, c, g or t
  modified_base (2961425)..(2961425): a, c, g or t
  modified_base (2962535)..(2962535): a, c, g or t
  modified_base (2963131)..(2963131): a, c, g or t
  modified_base (2965538)..(2965538): a, c, g or t
  modified_base (2965586)..(2965586): a, c, g or t
  modified_base (2965591)..(2965591): a, c, g or t
  modified_base (2966850)..(2966850): a, c, g or t
  modified_base (2966861)..(2966861): a, c, g or t
  modified_base (2967358)..(2967366): a, c, g or t
  modified_base (2967550)..(2967553): a, c, g or t
  modified_base (2969786)..(2969786): a, c, g or t
  modified_base (2970400)..(2970400): a, c, g or t
  modified_base (2971631)..(2971631): a, c, g or t
  modified_base (2971787)..(2971787): a, c, g or t
  modified_base (2973985)..(2973988): a, c, g or t
  modified_base (2974759)..(2974759): a, c, g or t
  modified_base (2976955)..(2976961): a, c, g or t
  modified_base (2977322)..(2977322): a, c, g or t
  modified_base (2977324)..(2977331): a, c, g or t
  modified_base (2978393)..(2978393): a, c, g or t
  modified_base (2978739)..(2978739): a, c, g or t
  modified_base (2979728)..(2979728): a, c, g or t
  modified_base (2981696)..(2981697): a, c, g or t
  modified_base (2982235)..(2982235): a, c, g or t
  modified_base (2983665)..(2983672): a, c, g or t
  modified_base (2984361)..(2984361): a, c, g or t
  modified_base (2985182)..(2985182): a, c, g or t
  modified_base (2985227)..(2985227): a, c, g or t
  modified_base (2985606)..(2985606): a, c, g or t
  modified_base (2986011)..(2986011): a, c, g or t
  modified_base (2987928)..(2987929): a, c, g or t
  modified_base (2988493)..(2988493): a, c, g or t
  modified_base (2989000)..(2989000): a, c, g or t
  modified_base (2993134)..(2993144): a, c, g or t
  modified_base (2993150)..(2993151): a, c, g or t
  modified_base (2995005)..(2995005): a, c, g or t
  modified_base (2995525)..(2995525): a, c, g or t
  modified_base (2995604)..(2995609): a, c, g or t
  modified_base (2995729)..(2995729): a, c, g or t
  modified_base (2995738)..(2995738): a, c, g or t
  modified_base (2997560)..(2997561): a, c, g or t
  modified_base (2997665)..(2997665): a, c, g or t
  modified_base (2997950)..(2997950): a, c, g or t
  modified_base (2997970)..(2997970): a, c, g or t
  modified_base (2998018)..(2998018): a, c, g or t
  modified_base (2999073)..(2999073): a, c, g or t
  modified_base (2999197)..(2999197): a, c, g or t
  modified_base (3002588)..(3002588): a, c, g or t
  modified_base (3004605)..(3004607): a, c, g or t
  modified_base (3004611)..(3004611): a, c, g or t
  modified_base (3005789)..(3005789): a, c, g or t
  modified_base (3005840)..(3005840): a, c, g or t
  modified_base (3006974)..(3006974): a, c, g or t
  modified_base (3006980)..(3006980): a, c, g or t
  modified_base (3006982)..(3006982): a, c, g or t
  modified_base (3008426)..(3008426): a, c, g or t
  modified_base (3010351)..(3010351): a, c, g or t
  modified_base (3012303)..(3012303): a, c, g or t
  modified_base (3012625)..(3012625): a, c, g or t
  modified_base (3013576)..(3013576): a, c, g or t
  modified_base (3013758)..(3013758): a, c, g or t
  modified_base (3013760)..(3013760): a, c, g or t
  modified_base (3013832)..(3013832): a, c, g or t
  modified_base (3014341)..(3014341): a, c, g or t
  modified_base (3015176)..(3015176): a, c, g or t
  modified_base (3019425)..(3019428): a, c, g or t
  modified_base (3021281)..(3021281): a, c, g or t
  modified_base (3021656)..(3021656): a, c, g or t
  modified_base (3024296)..(3024296): a, c, g or t
  modified_base (3026236)..(3026236): a, c, g or t
  modified_base (3026381)..(3026382): a, c, g or t
  modified_base (3026384)..(3026386): a, c, g or t
  modified_base (3026931)..(3026931): a, c, g or t
  modified_base (3026951)..(3026951): a, c, g or t
  modified_base (3027001)..(3027001): a, c, g or t
  modified_base (3028080)..(3028085): a, c, g or t
  modified_base (3028278)..(3028278): a, c, g or t
  modified_base (3032344)..(3032347): a, c, g or t
  modified_base (3034396)..(3034396): a, c, g or t
  modified_base (3035165)..(3035165): a, c, g or t
  modified_base (3035787)..(3035787): a, c, g or t
  modified_base (3038571)..(3038571): a, c, g or t
  modified_base (3046629)..(3046629): a, c, g or t
  modified_base (3046848)..(3046848): a, c, g or t
  modified_base (3046874)..(3046874): a, c, g or t
  modified_base (3046914)..(3046914): a, c, g or t
  modified_base (3049911)..(3049911): a, c, g or t
  modified_base (3049949)..(3049949): a, c, g or t
  modified_base (3054948)..(3054948): a, c, g or t
  modified_base (3059621)..(3059621): a, c, g or t
  modified_base (3062696)..(3062696): a, c, g or t
  modified_base (3068401)..(3068401): a, c, g or t
  modified_base (3069135)..(3069138): a, c, g or t
  modified_base (3069363)..(3069367): a, c, g or t
  modified_base (3069384)..(3069384): a, c, g or t
  modified_base (3070974)..(3070974): a, c, g or t
  modified_base (3071583)..(3071583): a, c, g or t
  modified_base (3077370)..(3077370): a, c, g or t
  modified_base (3078727)..(3078727): a, c, g or t
  modified_base (3080892)..(3080892): a, c, g or t
  modified_base (3081045)..(3081045): a, c, g or t
  modified_base (3081501)..(3081506): a, c, g or t
  modified_base (3083793)..(3083793): a, c, g or t
  modified_base (3083865)..(3083865): a, c, g or t
  modified_base (3084249)..(3084249): a, c, g or t
  modified_base (3085386)..(3085389): a, c, g or t
  modified_base (3085420)..(3085420): a, c, g or t
  modified_base (3085576)..(3085576): a, c, g or t
  modified_base (3085616)..(3085621): a, c, g or t
  modified_base (3091741)..(3091744): a, c, g or t
  modified_base (3091747)..(3091748): a, c, g or t
  modified_base (3091750)..(3091759): a, c, g or t
  modified_base (3092138)..(3092138): a, c, g or t
  modified_base (3092185)..(3092185): a, c, g or t
  modified_base (3092203)..(3092203): a, c, g or t
  modified_base (3092207)..(3092207): a, c, g or t
  modified_base (3095006)..(3095009): a, c, g or t
  modified_base (3095343)..(3095348): a, c, g or t
  modified_base (3095464)..(3095464): a, c, g or t
  modified_base (3095473)..(3095473): a, c, g or t
  modified_base (3096046)..(3096046): a, c, g or t
  modified_base (3096132)..(3096178): a, c, g or t
  modified_base (3096184)..(3096184): a, c, g or t
  modified_base (3096351)..(3096351): a, c, g or t
  modified_base (3096392)..(3096393): a, c, g or t
  modified_base (3096397)..(3096436): a, c, g or t
  modified_base (3096590)..(3096629): a, c, g or t
  modified_base (3096693)..(3096697): a, c, g or t
  modified_base (3096701)..(3096701): a, c, g or t
  modified_base (3096710)..(3096710): a, c, g or t
  modified_base (3096766)..(3096771): a, c, g or t
  modified_base (3096773)..(3096774): a, c, g or t
  modified_base (3096798)..(3096799): a, c, g or t
  modified_base (3096822)..(3096822): a, c, g or t
  modified_base (3096847)..(3096856): a, c, g or t
  modified_base (3096955)..(3096956): a, c, g or t
  modified_base (3096982)..(3096983): a, c, g or t
  modified_base (3097095)..(3097096): a, c, g or t
  modified_base (3097227)..(3097227): a, c, g or t
  modified_base (3097335)..(3097335): a, c, g or t
  modified_base (3097625)..(3097626): a, c, g or t
  modified_base (3097628)..(3097631): a, c, g or t
  modified_base (3097638)..(3097640): a, c, g or t
  modified_base (3097642)..(3097649): a, c, g or t
  modified_base (3097784)..(3097798): a, c, g or t
  modified_base (3097883)..(3097887): a, c, g or t
  modified_base (3097951)..(3097954): a, c, g or t
  modified_base (3098057)..(3098061): a, c, g or t
  modified_base (3098190)..(3098192): a, c, g or t
  modified_base (3098255)..(3098255): a, c, g or t
  modified_base (3098562)..(3098562): a, c, g or t
  modified_base (3098671)..(3098675): a, c, g or t
  modified_base (3099523)..(3099523): a, c, g or t
  modified_base (3103164)..(3103164): a, c, g or t
  modified_base (3103629)..(3103629): a, c, g or t
  modified_base (3104044)..(3104047): a, c, g or t
  modified_base (3105211)..(3105212): a, c, g or t
  modified_base (3105216)..(3105219): a, c, g or t
  modified_base (3105285)..(3105288): a, c, g or t
  modified_base (3105321)..(3105321): a, c, g or t
  modified_base (3105602)..(3105602): a, c, g or t
  modified_base (3105648)..(3105651): a, c, g or t
  modified_base (3105663)..(3105663): a, c, g or t
  modified_base (3105696)..(3105696): a, c, g or t
  modified_base (3105960)..(3105960): a, c, g or t
  modified_base (3106729)..(3106729): a, c, g or t
  modified_base (3110993)..(3110993): a, c, g or t
  modified_base (3112677)..(3112681): a, c, g or t
  modified_base (3116993)..(3116993): a, c, g or t
  modified_base (3120400)..(3120403): a, c, g or t
  modified_base (3120772)..(3120775): a, c, g or t
  modified_base (3122166)..(3122181): a, c, g or t
  modified_base (3122662)..(3122662): a, c, g or t
  modified_base (3123344)..(3123392): a, c, g or t
  modified_base (3123420)..(3123420): a, c, g or t
  modified_base (3123425)..(3123485): a, c, g or t
  modified_base (3123496)..(3123497): a, c, g or t
  modified_base (3123523)..(3123568): a, c, g or t
  modified_base (3123573)..(3123573): a, c, g or t
  modified_base (3123577)..(3123578): a, c, g or t
  modified_base (3123590)..(3123596): a, c, g or t
  modified_base (3123634)..(3123636): a, c, g or t
  modified_base (3123639)..(3123640): a, c, g or t
  modified_base (3123642)..(3123643): a, c, g or t
  modified_base (3123667)..(3123680): a, c, g or t
  modified_base (3123704)..(3123756): a, c, g or t
  modified_base (3123767)..(3123768): a, c, g or t
  modified_base (3123780)..(3123802): a, c, g or t
  modified_base (3123813)..(3123814): a, c, g or t
  modified_base (3123818)..(3123820): a, c, g or t
  modified_base (3123826)..(3123858): a, c, g or t
  modified_base (3123864)..(3123865): a, c, g or t
  modified_base (3123905)..(3123921): a, c, g or t
  modified_base (3123963)..(3123964): a, c, g or t
  modified_base (3123968)..(3124044): a, c, g or t
  modified_base (3124057)..(3124058): a, c, g or t
  modified_base (3124133)..(3124134): a, c, g or t
  modified_base (3124139)..(3124939): a, c, g or t
  modified_base (3124942)..(3124945): a, c, g or t
  modified_base (3124947)..(3124948): a, c, g or t
  modified_base (3124960)..(3125183): a, c, g or t
  modified_base (3125205)..(3125206): a, c, g or t
  modified_base (3125211)..(3125469): a, c, g or t
  modified_base (3125479)..(3125480): a, c, g or t
  modified_base (3125490)..(3125529): a, c, g or t
  modified_base (3125551)..(3125556): a, c, g or t
  modified_base (3125590)..(3125814): a, c, g or t
  modified_base (3125914)..(3125955): a, c, g or t
  modified_base (3126085)..(3126085): a, c, g or t
  modified_base (3126115)..(3126154): a, c, g or t
  modified_base (3126196)..(3126202): a, c, g or t
  modified_base (3126229)..(3126232): a, c, g or t
  modified_base (3126237)..(3126295): a, c, g or t
  modified_base (3126302)..(3126302): a, c, g or t
  modified_base (3126305)..(3126305): a, c, g or t
  modified_base (3126332)..(3126332): a, c, g or t
  modified_base (3126334)..(3126339): a, c, g or t
  modified_base (3126341)..(3126341): a, c, g or t
  modified_base (3126346)..(3126346): a, c, g or t
  modified_base (3126362)..(3126421): a, c, g or t
  modified_base (3126425)..(3126425): a, c, g or t
  modified_base (3126439)..(3126440): a, c, g or t
  modified_base (3126444)..(3127232): a, c, g or t
  modified_base (3127235)..(3127235): a, c, g or t
  modified_base (3127238)..(3127238): a, c, g or t
  modified_base (3127267)..(3127488): a, c, g or t
  modified_base (3127490)..(3127491): a, c, g or t
  modified_base (3127515)..(3127515): a, c, g or t
  modified_base (3127517)..(3127639): a, c, g or t
  modified_base (3127647)..(3127647): a, c, g or t
  modified_base (3127659)..(3127662): a, c, g or t
  modified_base (3127684)..(3127700): a, c, g or t
  modified_base (3127731)..(3127731): a, c, g or t
  modified_base (3127744)..(3127745): a, c, g or t
  modified_base (3127747)..(3127761): a, c, g or t
  modified_base (3127861)..(3127886): a, c, g or t
  modified_base (3127902)..(3127903): a, c, g or t
  modified_base (3127908)..(3127933): a, c, g or t
  modified_base (3127990)..(3128022): a, c, g or t
  modified_base (3128025)..(3128026): a, c, g or t
  modified_base (3128029)..(3128030): a, c, g or t
  modified_base (3128121)..(3128128): a, c, g or t
  modified_base (3128232)..(3128233): a, c, g or t
  modified_base (3128235)..(3128236): a, c, g or t
  modified_base (3128238)..(3128239): a, c, g or t
  modified_base (3128275)..(3128276): a, c, g or t
  modified_base (3128306)..(3128307): a, c, g or t
  modified_base (3128311)..(3128312): a, c, g or t
  modified_base (3128385)..(3128400): a, c, g or t
  modified_base (3128428)..(3128429): a, c, g or t
  modified_base (3128440)..(3128441): a, c, g or t
  modified_base (3128467)..(3128476): a, c, g or t
  modified_base (3128527)..(3128530): a, c, g or t
  modified_base (3128532)..(3128533): a, c, g or t
  modified_base (3128535)..(3128536): a, c, g or t
  modified_base (3128682)..(3128719): a, c, g or t
  modified_base (3128740)..(3128741): a, c, g or t
  modified_base (3128757)..(3128758): a, c, g or t
  modified_base (3128767)..(3128768): a, c, g or t
  modified_base (3128772)..(3128773): a, c, g or t
  modified_base (3128800)..(3128801): a, c, g or t
  modified_base (3128841)..(3128859): a, c, g or t
  modified_base (3128935)..(3128940): a, c, g or t
  modified_base (3128970)..(3128986): a, c, g or t
  modified_base (3129040)..(3129054): a, c, g or t
  modified_base (3129120)..(3129176): a, c, g or t
  modified_base (3129205)..(3129206): a, c, g or t
  modified_base (3129234)..(3129242): a, c, g or t
  modified_base (3129255)..(3129256): a, c, g or t
  modified_base (3129262)..(3129263): a, c, g or t
  modified_base (3129265)..(3129294): a, c, g or t
  modified_base (3129323)..(3129328): a, c, g or t
  modified_base (3129353)..(3129434): a, c, g or t
  modified_base (3129457)..(3129615): a, c, g or t
  modified_base (3129639)..(3129641): a, c, g or t
  modified_base (3129702)..(3129720): a, c, g or t
  modified_base (3129748)..(3129748): a, c, g or t
  modified_base (3129763)..(3129766): a, c, g or t
  modified_base (3129773)..(3129774): a, c, g or t
  modified_base (3129776)..(3129776): a, c, g or t
  modified_base (3129787)..(3129787): a, c, g or t
  modified_base (3129790)..(3129803): a, c, g or t
  modified_base (3129885)..(3129888): a, c, g or t
  modified_base (3129895)..(3129895): a, c, g or t
  modified_base (3129924)..(3129924): a, c, g or t
  modified_base (3129943)..(3129944): a, c, g or t
  modified_base (3129968)..(3129971): a, c, g or t
  modified_base (3129974)..(3129978): a, c, g or t
  modified_base (3129980)..(3129980): a, c, g or t
  modified_base (3130014)..(3130015): a, c, g or t
  modified_base (3130017)..(3130068): a, c, g or t
  modified_base (3130092)..(3130135): a, c, g or t
  modified_base (3130138)..(3130139): a, c, g or t
  modified_base (3130185)..(3130185): a, c, g or t
  modified_base (3130190)..(3130239): a, c, g or t
  modified_base (3130427)..(3130438): a, c, g or t
  modified_base (3130482)..(3130482): a, c, g or t
  modified_base (3130588)..(3130589): a, c, g or t
  modified_base (3130673)..(3130681): a, c, g or t
  modified_base (3130694)..(3130695): a, c, g or t
  modified_base (3130781)..(3130783): a, c, g or t
  modified_base (3130786)..(3130848): a, c, g or t
  modified_base (3131004)..(3131005): a, c, g or t
  modified_base (3131044)..(3131044): a, c, g or t
  modified_base (3131046)..(3131050): a, c, g or t
  modified_base (3131400)..(3131403): a, c, g or t
  modified_base (3131522)..(3131525): a, c, g or t
  modified_base (3131582)..(3131583): a, c, g or t
  modified_base (3131586)..(3131596): a, c, g or t
  modified_base (3131690)..(3131690): a, c, g or t
  modified_base (3131878)..(3131878): a, c, g or t
  modified_base (3131955)..(3131958): a, c, g or t
  modified_base (3131994)..(3132004): a, c, g or t
  modified_base (3132132)..(3132136): a, c, g or t
  modified_base (3132176)..(3132181): a, c, g or t
  modified_base (3132220)..(3132226): a, c, g or t
  modified_base (3132731)..(3132738): a, c, g or t
  modified_base (3133275)..(3133282): a, c, g or t
  modified_base (3133420)..(3133420): a, c, g or t
  modified_base (3133605)..(3133605): a, c, g or t
  modified_base (3133644)..(3133644): a, c, g or t
  modified_base (3133693)..(3133693): a, c, g or t
  modified_base (3133708)..(3133708): a, c, g or t
  modified_base (3134804)..(3134804): a, c, g or t
  modified_base (3136276)..(3136276): a, c, g or t
  modified_base (3136311)..(3136314): a, c, g or t
  modified_base (3137462)..(3137470): a, c, g or t
  modified_base (3140021)..(3140021): a, c, g or t
  modified_base (3140612)..(3140612): a, c, g or t
  modified_base (3140911)..(3140911): a, c, g or t
  modified_base (3140955)..(3140955): a, c, g or t
  modified_base (3141343)..(3141343): a, c, g or t
  modified_base (3141490)..(3141490): a, c, g or t
  modified_base (3142177)..(3142177): a, c, g or t
  modified_base (3142792)..(3142792): a, c, g or t
  modified_base (3143778)..(3143778): a, c, g or t
  modified_base (3144401)..(3144401): a, c, g or t
  modified_base (3146668)..(3146668): a, c, g or t
  modified_base (3146672)..(3146672): a, c, g or t
  modified_base (3147186)..(3147186): a, c, g or t
  modified_base (3147272)..(3147275): a, c, g or t
  modified_base (3148011)..(3148011): a, c, g or t
  modified_base (3148042)..(3148045): a, c, g or t
  modified_base (3149617)..(3149620): a, c, g or t
  modified_base (3149857)..(3149857): a, c, g or t
  modified_base (3150499)..(3150499): a, c, g or t
  modified_base (3150501)..(3150501): a, c, g or t
  modified_base (3150585)..(3150585): a, c, g or t
  modified_base (3150745)..(3150748): a, c, g or t
  modified_base (3151148)..(3151148): a, c, g or t
  modified_base (3151721)..(3151721): a, c, g or t
  modified_base (3151759)..(3151759): a, c, g or t
  modified_base (3151963)..(3151963): a, c, g or t
  modified_base (3153635)..(3153635): a, c, g or t
  modified_base (3153854)..(3153854): a, c, g or t
  modified_base (3153880)..(3153880): a, c, g or t
  modified_base (3154571)..(3154571): a, c, g or t
  modified_base (3155491)..(3155499): a, c, g or t
  modified_base (3156120)..(3156120): a, c, g or t
  modified_base (3156395)..(3156395): a, c, g or t
  modified_base (3157372)..(3157372): a, c, g or t
  modified_base (3157806)..(3157806): a, c, g or t
  modified_base (3157823)..(3157823): a, c, g or t
  modified_base (3157946)..(3157955): a, c, g or t
  modified_base (3158186)..(3158204): a, c, g or t
  modified_base (3160734)..(3160734): a, c, g or t
  modified_base (3161171)..(3161171): a, c, g or t
  modified_base (3161713)..(3161713): a, c, g or t
  modified_base (3161741)..(3161741): a, c, g or t
  modified_base (3162556)..(3162556): a, c, g or t
  modified_base (3162684)..(3162684): a, c, g or t
  modified_base (3164122)..(3164123): a, c, g or t
  modified_base (3169058)..(3169058): a, c, g or t
  modified_base (3170266)..(3170266): a, c, g or t
  modified_base (3170355)..(3170355): a, c, g or t
  modified_base (3170444)..(3170444): a, c, g or t
  modified_base (3170459)..(3170459): a, c, g or t
  modified_base (3170523)..(3170523): a, c, g or t
  modified_base (3172076)..(3172076): a, c, g or t
  modified_base (3173435)..(3173435): a, c, g or t
  modified_base (3173713)..(3173713): a, c, g or t
  modified_base (3173938)..(3173938): a, c, g or t
  modified_base (3176152)..(3176155): a, c, g or t
  modified_base (3176162)..(3176166): a, c, g or t
  modified_base (3176360)..(3176360): a, c, g or t
  modified_base (3176714)..(3176714): a, c, g or t
  modified_base (3177263)..(3177266): a, c, g or t
  modified_base (3177837)..(3177838): a, c, g or t
  modified_base (3177933)..(3177933): a, c, g or t
  modified_base (3178230)..(3178230): a, c, g or t
  modified_base (3181055)..(3181058): a, c, g or t
  modified_base (3181060)..(3181061): a, c, g or t
  modified_base (3181063)..(3181084): a, c, g or t
  modified_base (3181087)..(3181088): a, c, g or t
  modified_base (3181191)..(3181192): a, c, g or t
  modified_base (3181196)..(3181197): a, c, g or t
  modified_base (3181199)..(3181244): a, c, g or t
  modified_base (3181331)..(3181350): a, c, g or t
  modified_base (3181353)..(3181354): a, c, g or t
  modified_base (3185012)..(3185015): a, c, g or t
  modified_base (3185918)..(3185918): a, c, g or t
  modified_base (3186148)..(3186148): a, c, g or t
  modified_base (3186542)..(3186542): a, c, g or t
  modified_base (3187237)..(3187237): a, c, g or t
  modified_base (3188064)..(3188070): a, c, g or t
  modified_base (3188072)..(3188073): a, c, g or t
  modified_base (3188577)..(3188578): a, c, g or t
  modified_base (3188580)..(3188583): a, c, g or t
  modified_base (3188587)..(3188588): a, c, g or t
  modified_base (3188590)..(3188591): a, c, g or t
  modified_base (3190094)..(3190094): a, c, g or t
  modified_base (3190102)..(3190102): a, c, g or t
  modified_base (3190149)..(3190152): a, c, g or t
  modified_base (3192012)..(3192015): a, c, g or t
  modified_base (3192537)..(3192537): a, c, g or t
  modified_base (3192677)..(3192677): a, c, g or t
  modified_base (3193331)..(3193331): a, c, g or t
  modified_base (3197303)..(3197304): a, c, g or t
  modified_base (3198346)..(3198346): a, c, g or t
  modified_base (3198419)..(3198419): a, c, g or t
  modified_base (3199474)..(3199474): a, c, g or t
  modified_base (3200339)..(3200339): a, c, g or t
  modified_base (3200832)..(3200836): a, c, g or t
  modified_base (3201191)..(3201195): a, c, g or t
  modified_base (3201197)..(3201198): a, c, g or t
  modified_base (3201535)..(3201538): a, c, g or t
  modified_base (3202178)..(3202178): a, c, g or t
  modified_base (3205767)..(3205767): a, c, g or t
  modified_base (3205921)..(3205921): a, c, g or t
  modified_base (3207240)..(3207240): a, c, g or t
  modified_base (3207653)..(3207656): a, c, g or t
  modified_base (3208929)..(3208929): a, c, g or t
  modified_base (3209063)..(3209063): a, c, g or t
  modified_base (3209277)..(3209277): a, c, g or t
  modified_base (3210109)..(3210109): a, c, g or t
  modified_base (3210821)..(3210821): a, c, g or t
  modified_base (3211333)..(3211333): a, c, g or t
  modified_base (3213107)..(3213110): a, c, g or t
  modified_base (3213417)..(3213420): a, c, g or t
  modified_base (3213904)..(3213913): a, c, g or t
  modified_base (3214199)..(3214199): a, c, g or t
  modified_base (3214942)..(3214942): a, c, g or t
  modified_base (3216568)..(3216568): a, c, g or t
  modified_base (3217289)..(3217289): a, c, g or t
  modified_base (3218604)..(3218607): a, c, g or t
  modified_base (3218690)..(3218690): a, c, g or t
  modified_base (3220396)..(3220398): a, c, g or t
  modified_base (3220400)..(3220400): a, c, g or t
  modified_base (3221001)..(3221001): a, c, g or t
  modified_base (3221571)..(3221571): a, c, g or t
  modified_base (3221641)..(3221641): a, c, g or t
  modified_base (3222061)..(3222064): a, c, g or t
  modified_base (3225297)..(3225297): a, c, g or t
  modified_base (3226050)..(3226050): a, c, g or t
  modified_base (3226608)..(3226608): a, c, g or t
  modified_base (3226638)..(3226638): a, c, g or t
  modified_base (3227308)..(3227308): a, c, g or t
  modified_base (3233468)..(3233471): a, c, g or t
  modified_base (3235375)..(3235375): a, c, g or t
  modified_base (3236104)..(3236104): a, c, g or t
  modified_base (3240723)..(3240723): a, c, g or t
  modified_base (3240735)..(3240735): a, c, g or t
  modified_base (3240858)..(3240858): a, c, g or t
  modified_base (3241741)..(3241741): a, c, g or t
  modified_base (3242696)..(3242696): a, c, g or t
  modified_base (3246133)..(3246134): a, c, g or t
  modified_base (3246136)..(3246141): a, c, g or t
  modified_base (3248166)..(3248168): a, c, g or t
  modified_base (3249290)..(3249290): a, c, g or t
  modified_base (3249529)..(3249531): a, c, g or t
  modified_base (3250789)..(3250792): a, c, g or t
  modified_base (3252665)..(3252665): a, c, g or t
  modified_base (3253249)..(3253249): a, c, g or t
  modified_base (3260448)..(3260448): a, c, g or t
  modified_base (3260741)..(3260741): a, c, g or t
  modified_base (3262189)..(3262189): a, c, g or t
  modified_base (3262832)..(3262833): a, c, g or t
  modified_base (3263272)..(3263272): a, c, g or t
  modified_base (3263936)..(3263936): a, c, g or t
  modified_base (3264571)..(3264571): a, c, g or t
  modified_base (3267053)..(3267055): a, c, g or t
  modified_base (3267958)..(3267958): a, c, g or t
  modified_base (3268838)..(3268838): a, c, g or t
  modified_base (3268840)..(3268840): a, c, g or t
  modified_base (3271173)..(3271185): a, c, g or t
  modified_base (3271642)..(3271643): a, c, g or t
  modified_base (3271730)..(3271730): a, c, g or t
  modified_base (3277243)..(3277249): a, c, g or t
  modified_base (3277402)..(3277405): a, c, g or t
  modified_base (3278300)..(3278300): a, c, g or t
  modified_base (3279934)..(3279934): a, c, g or t
  modified_base (3281771)..(3281771): a, c, g or t
  modified_base (3284170)..(3284170): a, c, g or t
  modified_base (3285950)..(3285953): a, c, g or t
  modified_base (3287213)..(3287213): a, c, g or t
  modified_base (3289368)..(3289368): a, c, g or t
  modified_base (3290692)..(3290695): a, c, g or t
  modified_base (3293143)..(3293143): a, c, g or t
  modified_base (3293215)..(3293215): a, c, g or t
  modified_base (3293432)..(3293436): a, c, g or t
  modified_base (3293771)..(3293771): a, c, g or t
  modified_base (3295887)..(3295887): a, c, g or t
  modified_base (3296035)..(3296035): a, c, g or t
  modified_base (3298418)..(3298418): a, c, g or t
  modified_base (3300929)..(3300935): a, c, g or t
  modified_base (3302035)..(3302035): a, c, g or t
  modified_base (3302503)..(3302503): a, c, g or t
  modified_base (3304282)..(3304282): a, c, g or t
  modified_base (3304427)..(3304434): a, c, g or t
  modified_base (3305394)..(3305394): a, c, g or t
  modified_base (3305515)..(3305515): a, c, g or t
  modified_base (3308746)..(3308763): a, c, g or t
  modified_base (3308827)..(3308884): a, c, g or t
  modified_base (3308904)..(3308905): a, c, g or t
  modified_base (3308956)..(3308957): a, c, g or t
  modified_base (3309745)..(3309745): a, c, g or t
  modified_base (3310031)..(3310031): a, c, g or t
  modified_base (3310143)..(3310143): a, c, g or t
  modified_base (3310294)..(3310294): a, c, g or t
  modified_base (3310973)..(3310974): a, c, g or t
  modified_base (3310976)..(3310978): a, c, g or t
  modified_base (3311977)..(3311977): a, c, g or t
  modified_base (3312004)..(3312004): a, c, g or t
  modified_base (3314489)..(3314492): a, c, g or t
  modified_base (3317264)..(3317264): a, c, g or t
  modified_base (3319849)..(3319849): a, c, g or t
  modified_base (3322927)..(3322930): a, c, g or t
  modified_base (3323915)..(3323918): a, c, g or t
  modified_base (3325685)..(3325685): a, c, g or t
  modified_base (3330324)..(3330324): a, c, g or t
  modified_base (3331812)..(3331812): a, c, g or t
  modified_base (3332073)..(3332073): a, c, g or t
  modified_base (3332849)..(3332849): a, c, g or t
  modified_base (3333716)..(3333720): a, c, g or t
  modified_base (3334535)..(3334535): a, c, g or t
  modified_base (3335688)..(3335688): a, c, g or t
  modified_base (3336243)..(3336243): a, c, g or t
  modified_base (3339519)..(3339519): a, c, g or t
  modified_base (3340831)..(3340831): a, c, g or t
  modified_base (3341456)..(3341456): a, c, g or t
  modified_base (3344291)..(3344291): a, c, g or t
  modified_base (3344343)..(3344343): a, c, g or t
  modified_base (3345566)..(3345569): a, c, g or t
  modified_base (3345571)..(3345572): a, c, g or t
  modified_base (3345586)..(3345586): a, c, g or t
  modified_base (3347347)..(3347351): a, c, g or t
  modified_base (3348174)..(3348174): a, c, g or t
  modified_base (3348441)..(3348441): a, c, g or t
  modified_base (3349675)..(3349675): a, c, g or t
  modified_base (3349677)..(3349694): a, c, g or t
  modified_base (3349743)..(3349757): a, c, g or t
  modified_base (3350654)..(3350654): a, c, g or t
  modified_base (3352553)..(3352556): a, c, g or t
  modified_base (3352746)..(3352750): a, c, g or t
  modified_base (3352752)..(3352754): a, c, g or t
  modified_base (3352757)..(3352759): a, c, g or t
  modified_base (3353368)..(3353369): a, c, g or t
  modified_base (3353449)..(3353452): a, c, g or t
  modified_base (3353933)..(3353936): a, c, g or t
  modified_base (3356184)..(3356188): a, c, g or t
  modified_base (3356278)..(3356286): a, c, g or t
  modified_base (3356442)..(3356442): a, c, g or t
  modified_base (3356623)..(3356623): a, c, g or t
  modified_base (3357613)..(3357614): a, c, g or t
  modified_base (3357637)..(3357637): a, c, g or t
  modified_base (3358351)..(3358351): a, c, g or t
  modified_base (3358709)..(3358709): a, c, g or t
  modified_base (3358858)..(3358864): a, c, g or t
  modified_base (3361383)..(3361383): a, c, g or t
  modified_base (3362463)..(3362467): a, c, g or t
  modified_base (3364830)..(3364833): a, c, g or t
  modified_base (3365122)..(3365124): a, c, g or t
  modified_base (3365304)..(3365304): a, c, g or t
  modified_base (3366041)..(3366041): a, c, g or t
  modified_base (3366659)..(3366663): a, c, g or t
  modified_base (3366762)..(3366762): a, c, g or t
  modified_base (3368383)..(3368383): a, c, g or t
  modified_base (3368539)..(3368540): a, c, g or t
  modified_base (3369779)..(3369779): a, c, g or t
  modified_base (3371456)..(3371456): a, c, g or t
  modified_base (3373456)..(3373459): a, c, g or t
  modified_base (3377070)..(3377070): a, c, g or t
  modified_base (3378740)..(3378740): a, c, g or t
  modified_base (3378898)..(3378898): a, c, g or t
  modified_base (3379032)..(3379037): a, c, g or t
  modified_base (3380382)..(3380382): a, c, g or t
  modified_base (3381488)..(3381491): a, c, g or t
  modified_base (3381494)..(3381494): a, c, g or t
  modified_base (3383303)..(3383303): a, c, g or t
  modified_base (3384353)..(3384353): a, c, g or t
  modified_base (3385119)..(3385119): a, c, g or t
  modified_base (3386021)..(3386021): a, c, g or t
  modified_base (3388336)..(3388336): a, c, g or t
  modified_base (3389764)..(3389764): a, c, g or t
  modified_base (3394036)..(3394036): a, c, g or t
  modified_base (3395278)..(3395278): a, c, g or t
  modified_base (3398643)..(3398643): a, c, g or t
  modified_base (3399363)..(3399363): a, c, g or t
  modified_base (3399366)..(3399366): a, c, g or t
  modified_base (3400770)..(3400770): a, c, g or t
  modified_base (3401157)..(3401157): a, c, g or t
  modified_base (3406596)..(3406596): a, c, g or t
  modified_base (3406625)..(3406625): a, c, g or t
  modified_base (3407291)..(3407291): a, c, g or t
  modified_base (3408673)..(3408673): a, c, g or t
  modified_base (3409618)..(3409618): a, c, g or t
  modified_base (3410581)..(3410581): a, c, g or t
  modified_base (3410782)..(3410782): a, c, g or t
  modified_base (3410864)..(3410864): a, c, g or t
  modified_base (3412044)..(3412047): a, c, g or t
  modified_base (3413611)..(3413611): a, c, g or t
  modified_base (3414350)..(3414350): a, c, g or t
  modified_base (3418396)..(3418396): a, c, g or t
  modified_base (3418401)..(3418408): a, c, g or t
  modified_base (3418924)..(3418924): a, c, g or t
  modified_base (3419335)..(3419335): a, c, g or t
  modified_base (3419355)..(3419357): a, c, g or t
  modified_base (3419475)..(3419475): a, c, g or t
  modified_base (3420870)..(3420873): a, c, g or t
  modified_base (3421733)..(3421734): a, c, g or t
  modified_base (3421756)..(3421756): a, c, g or t
  modified_base (3422711)..(3422711): a, c, g or t
  modified_base (3430719)..(3430719): a, c, g or t
  modified_base (3432516)..(3432516): a, c, g or t
  modified_base (3433866)..(3433866): a, c, g or t
  modified_base (3433869)..(3433872): a, c, g or t
  modified_base (3437895)..(3437895): a, c, g or t
  modified_base (3439090)..(3439094): a, c, g or t
  modified_base (3439511)..(3439511): a, c, g or t
  modified_base (3439875)..(3439881): a, c, g or t
  modified_base (3441663)..(3441663): a, c, g or t
  modified_base (3442958)..(3442958): a, c, g or t
  modified_base (3442985)..(3442985): a, c, g or t
  modified_base (3443059)..(3443059): a, c, g or t
  modified_base (3443080)..(3443080): a, c, g or t
  modified_base (3444832)..(3444835): a, c, g or t
  modified_base (3445274)..(3445274): a, c, g or t
  modified_base (3446411)..(3446415): a, c, g or t
  modified_base (3448269)..(3448269): a, c, g or t
  modified_base (3451070)..(3451078): a, c, g or t
  modified_base (3451414)..(3451417): a, c, g or t
  modified_base (3456066)..(3456066): a, c, g or t
  modified_base (3457025)..(3457025): a, c, g or t
  modified_base (3457446)..(3457446): a, c, g or t
  modified_base (3460342)..(3460346): a, c, g or t
  modified_base (3460409)..(3460412): a, c, g or t
  modified_base (3460414)..(3460418): a, c, g or t
  modified_base (3460724)..(3460724): a, c, g or t
  modified_base (3463660)..(3463660): a, c, g or t
  modified_base (3466129)..(3466129): a, c, g or t
  modified_base (3467531)..(3467531): a, c, g or t
  modified_base (3468766)..(3468766): a, c, g or t
  modified_base (3471704)..(3471704): a, c, g or t
  modified_base (3471909)..(3471909): a, c, g or t
  modified_base (3472140)..(3472140): a, c, g or t
  modified_base (3472695)..(3472698): a, c, g or t
  modified_base (3473636)..(3473636): a, c, g or t
  modified_base (3475723)..(3475725): a, c, g or t
  modified_base (3478478)..(3478478): a, c, g or t
  modified_base (3480109)..(3480109): a, c, g or t
  modified_base (3481776)..(3481777): a, c, g or t
  modified_base (3483200)..(3483203): a, c, g or t
  modified_base (3483968)..(3483968): a, c, g or t
  modified_base (3485537)..(3485537): a, c, g or t
  modified_base (3486097)..(3486097): a, c, g or t
  modified_base (3486757)..(3486757): a, c, g or t
  modified_base (3487978)..(3487983): a, c, g or t
  modified_base (3488066)..(3488066): a, c, g or t
  modified_base (3488137)..(3488137): a, c, g or t
  modified_base (3489298)..(3489301): a, c, g or t
  modified_base (3489927)..(3489930): a, c, g or t
  modified_base (3491949)..(3491959): a, c, g or t
  modified_base (3491961)..(3491962): a, c, g or t
  modified_base (3492486)..(3492486): a, c, g or t
  modified_base (3492491)..(3492498): a, c, g or t
  modified_base (3493127)..(3493132): a, c, g or t
  modified_base (3493684)..(3493687): a, c, g or t
  modified_base (3493805)..(3493808): a, c, g or t
  modified_base (3494663)..(3494663): a, c, g or t
  modified_base (3495192)..(3495195): a, c, g or t
  modified_base (3495197)..(3495200): a, c, g or t
  modified_base (3495338)..(3495341): a, c, g or t
  modified_base (3495346)..(3495347): a, c, g or t
  modified_base (3495354)..(3495355): a, c, g or t
  modified_base (3495359)..(3495360): a, c, g or t
  modified_base (3500662)..(3500671): a, c, g or t
  modified_base (3502696)..(3502696): a, c, g or t
  modified_base (3504057)..(3504060): a, c, g or t
  modified_base (3504301)..(3504301): a, c, g or t
  modified_base (3504561)..(3504564): a, c, g or t
  modified_base (3504936)..(3504997): a, c, g or t
  modified_base (3505569)..(3505569): a, c, g or t
  modified_base (3506219)..(3506219): a, c, g or t
  modified_base (3506312)..(3506312): a, c, g or t
  modified_base (3509495)..(3509495): a, c, g or t
  modified_base (3510792)..(3510792): a, c, g or t
  modified_base (3511409)..(3511409): a, c, g or t
  modified_base (3512408)..(3512408): a, c, g or t
  modified_base (3512519)..(3512519): a, c, g or t
  modified_base (3514691)..(3514691): a, c, g or t
  modified_base (3515137)..(3515137): a, c, g or t
  modified_base (3515947)..(3515947): a, c, g or t
  modified_base (3516990)..(3516990): a, c, g or t
  modified_base (3518047)..(3518047): a, c, g or t
  modified_base (3518837)..(3518837): a, c, g or t
  modified_base (3520613)..(3520613): a, c, g or t
  modified_base (3521128)..(3521128): a, c, g or t
  modified_base (3521796)..(3521796): a, c, g or t
  modified_base (3522001)..(3522004): a, c, g or t
  modified_base (3522046)..(3522046): a, c, g or t
  modified_base (3522065)..(3522065): a, c, g or t
  modified_base (3522144)..(3522144): a, c, g or t
  modified_base (3525461)..(3525461): a, c, g or t
  modified_base (3527270)..(3527270): a, c, g or t
  modified_base (3528388)..(3528388): a, c, g or t
  modified_base (3529613)..(3529613): a, c, g or t
  modified_base (3529828)..(3529828): a, c, g or t
  modified_base (3533793)..(3533793): a, c, g or t
  modified_base (3535009)..(3535009): a, c, g or t
  modified_base (3535649)..(3535655): a, c, g or t
  modified_base (3538546)..(3538546): a, c, g or t
  modified_base (3539027)..(3539027): a, c, g or t
  modified_base (3542343)..(3542344): a, c, g or t
  modified_base (3542542)..(3542542): a, c, g or t
  modified_base (3544323)..(3544323): a, c, g or t
  modified_base (3544389)..(3544389): a, c, g or t
  modified_base (3546038)..(3546038): a, c, g or t
  modified_base (3548739)..(3548739): a, c, g or t
  modified_base (3550616)..(3550616): a, c, g or t
  modified_base (3551139)..(3551139): a, c, g or t
  modified_base (3551557)..(3551560): a, c, g or t
  modified_base (3556893)..(3556896): a, c, g or t
  modified_base (3560671)..(3560671): a, c, g or t
  modified_base (3563615)..(3563617): a, c, g or t
  modified_base (3564140)..(3564141): a, c, g or t
  modified_base (3564161)..(3564161): a, c, g or t
  modified_base (3565549)..(3565550): a, c, g or t
  modified_base (3565818)..(3565818): a, c, g or t
  modified_base (3568912)..(3568912): a, c, g or t
  modified_base (3569623)..(3569627): a, c, g or t
  modified_base (3570377)..(3570377): a, c, g or t
  modified_base (3571526)..(3571532): a, c, g or t
  modified_base (3572917)..(3572917): a, c, g or t
  modified_base (3573254)..(3573254): a, c, g or t
  modified_base (3573533)..(3573533): a, c, g or t
  modified_base (3574367)..(3574372): a, c, g or t
  modified_base (3574863)..(3574868): a, c, g or t
  modified_base (3578719)..(3578722): a, c, g or t
  modified_base (3581616)..(3581616): a, c, g or t
  modified_base (3581759)..(3581759): a, c, g or t
  modified_base (3584783)..(3584783): a, c, g or t
  modified_base (3585658)..(3585658): a, c, g or t
  modified_base (3585677)..(3585677): a, c, g or t
  modified_base (3585747)..(3585748): a, c, g or t
  modified_base (3585794)..(3585795): a, c, g or t
  modified_base (3589035)..(3589036): a, c, g or t
  modified_base (3589639)..(3589639): a, c, g or t
  modified_base (3591439)..(3591439): a, c, g or t
  modified_base (3591461)..(3591464): a, c, g or t
  modified_base (3591590)..(3591595): a, c, g or t
  modified_base (3591862)..(3591862): a, c, g or t
  modified_base (3593483)..(3593486): a, c, g or t
  modified_base (3594373)..(3594373): a, c, g or t
  modified_base (3594920)..(3594920): a, c, g or t
  modified_base (3596711)..(3596711): a, c, g or t
  modified_base (3596738)..(3596738): a, c, g or t
  modified_base (3600299)..(3600299): a, c, g or t
  modified_base (3600326)..(3600326): a, c, g or t
  modified_base (3600363)..(3600363): a, c, g or t
  modified_base (3600389)..(3600389): a, c, g or t
  modified_base (3600399)..(3600399): a, c, g or t
  modified_base (3600452)..(3600452): a, c, g or t
  modified_base (3600473)..(3600473): a, c, g or t
  modified_base (3600482)..(3600482): a, c, g or t
  modified_base (3601002)..(3601008): a, c, g or t
  modified_base (3601421)..(3601423): a, c, g or t
  modified_base (3601811)..(3601811): a, c, g or t
  modified_base (3602602)..(3602603): a, c, g or t
  modified_base (3602608)..(3602608): a, c, g or t
  modified_base (3602980)..(3602980): a, c, g or t
  modified_base (3604262)..(3604267): a, c, g or t
  modified_base (3604529)..(3604529): a, c, g or t
  modified_base (3604754)..(3604754): a, c, g or t
  modified_base (3606961)..(3606961): a, c, g or t
  modified_base (3612588)..(3612588): a, c, g or t
  modified_base (3613356)..(3613356): a, c, g or t
  modified_base (3613726)..(3613726): a, c, g or t
  modified_base (3613729)..(3613729): a, c, g or t
  modified_base (3613894)..(3613894): a, c, g or t
  modified_base (3614719)..(3614719): a, c, g or t
  modified_base (3615525)..(3615525): a, c, g or t
  modified_base (3615601)..(3615603): a, c, g or t
  modified_base (3619095)..(3619095): a, c, g or t
  modified_base (3619542)..(3619542): a, c, g or t
  modified_base (3620424)..(3620424): a, c, g or t
  modified_base (3621826)..(3621829): a, c, g or t
  modified_base (3622342)..(3622350): a, c, g or t
  modified_base (3622808)..(3622808): a, c, g or t
  modified_base (3622855)..(3622855): a, c, g or t
  modified_base (3623162)..(3623162): a, c, g or t
  modified_base (3623529)..(3623529): a, c, g or t
  modified_base (3623740)..(3623740): a, c, g or t
  modified_base (3624899)..(3624911): a, c, g or t
  modified_base (3627746)..(3627746): a, c, g or t
  modified_base (3629564)..(3629567): a, c, g or t
  modified_base (3631435)..(3631435): a, c, g or t
  modified_base (3635151)..(3635151): a, c, g or t
  modified_base (3636289)..(3636289): a, c, g or t
  modified_base (3636291)..(3636294): a, c, g or t
  modified_base (3636526)..(3636529): a, c, g or t
  modified_base (3636533)..(3636538): a, c, g or t
  modified_base (3636851)..(3636851): a, c, g or t
  modified_base (3637361)..(3637361): a, c, g or t
  modified_base (3637995)..(3637998): a, c, g or t
  modified_base (3639140)..(3639140): a, c, g or t
  modified_base (3639674)..(3639674): a, c, g or t
  modified_base (3643396)..(3643396): a, c, g or t
  modified_base (3643552)..(3643559): a, c, g or t
  modified_base (3643757)..(3643765): a, c, g or t
  modified_base (3644226)..(3644226): a, c, g or t
  modified_base (3646706)..(3646713): a, c, g or t
  modified_base (3647755)..(3647755): a, c, g or t
  modified_base (3648202)..(3648202): a, c, g or t
  modified_base (3648745)..(3648745): a, c, g or t
  modified_base (3649348)..(3649348): a, c, g or t
  modified_base (3649440)..(3649440): a, c, g or t
  modified_base (3650389)..(3650389): a, c, g or t
  modified_base (3652088)..(3652088): a, c, g or t
  modified_base (3657114)..(3657114): a, c, g or t
  modified_base (3657347)..(3657347): a, c, g or t
  modified_base (3658112)..(3658113): a, c, g or t
  modified_base (3658116)..(3658117): a, c, g or t
  modified_base (3658119)..(3658124): a, c, g or t
  modified_base (3658178)..(3658197): a, c, g or t
  modified_base (3663549)..(3663549): a, c, g or t
  modified_base (3663777)..(3663777): a, c, g or t
  modified_base (3666444)..(3666444): a, c, g or t
  modified_base (3668485)..(3668485): a, c, g or t
  modified_base (3668515)..(3668515): a, c, g or t
  modified_base (3669368)..(3669371): a, c, g or t
  modified_base (3671456)..(3671456): a, c, g or t
  modified_base (3672890)..(3672890): a, c, g or t
  modified_base (3674123)..(3674123): a, c, g or t
  modified_base (3674813)..(3674813): a, c, g or t
  modified_base (3676512)..(3676512): a, c, g or t
  modified_base (3676817)..(3676817): a, c, g or t
  modified_base (3677955)..(3677955): a, c, g or t
  modified_base (3679852)..(3679852): a, c, g or t
  modified_base (3681271)..(3681275): a, c, g or t
  modified_base (3681835)..(3681835): a, c, g or t
  modified_base (3682789)..(3682789): a, c, g or t
  modified_base (3683579)..(3683582): a, c, g or t
  modified_base (3684054)..(3684055): a, c, g or t
  modified_base (3684575)..(3684575): a, c, g or t
  modified_base (3685071)..(3685071): a, c, g or t
  modified_base (3685488)..(3685488): a, c, g or t
  modified_base (3688431)..(3688431): a, c, g or t
  modified_base (3689411)..(3689411): a, c, g or t
  modified_base (3691407)..(3691407): a, c, g or t
  modified_base (3693291)..(3693291): a, c, g or t
  modified_base (3693996)..(3694001): a, c, g or t
  modified_base (3695551)..(3695551): a, c, g or t
  modified_base (3695567)..(3695567): a, c, g or t
  modified_base (3696854)..(3696854): a, c, g or t
  modified_base (3701656)..(3701668): a, c, g or t
  modified_base (3702790)..(3702790): a, c, g or t
  modified_base (3706152)..(3706152): a, c, g or t
  modified_base (3706157)..(3706157): a, c, g or t
  modified_base (3712369)..(3712370): a, c, g or t
  modified_base (3712374)..(3712375): a, c, g or t
  modified_base (3712377)..(3712378): a, c, g or t
  modified_base (3716735)..(3716735): a, c, g or t
  modified_base (3719758)..(3719765): a, c, g or t
  modified_base (3720717)..(3720718): a, c, g or t
  modified_base (3723666)..(3723666): a, c, g or t
  modified_base (3726007)..(3726007): a, c, g or t
  modified_base (3726465)..(3726465): a, c, g or t
  modified_base (3728336)..(3728336): a, c, g or t
  modified_base (3729176)..(3729176): a, c, g or t
  modified_base (3730560)..(3730560): a, c, g or t
  modified_base (3732921)..(3732921): a, c, g or t
  modified_base (3736595)..(3736595): a, c, g or t
  modified_base (3737340)..(3737340): a, c, g or t
  modified_base (3737369)..(3737369): a, c, g or t
  modified_base (3737738)..(3737738): a, c, g or t
  modified_base (3738314)..(3738317): a, c, g or t
  modified_base (3738543)..(3738543): a, c, g or t
  modified_base (3739297)..(3739297): a, c, g or t
  modified_base (3744581)..(3744581): a, c, g or t
  modified_base (3745243)..(3745243): a, c, g or t
  modified_base (3746263)..(3746263): a, c, g or t
  modified_base (3746382)..(3746382): a, c, g or t
  modified_base (3749405)..(3749406): a, c, g or t
  modified_base (3749712)..(3749712): a, c, g or t
  modified_base (3749756)..(3749760): a, c, g or t
  modified_base (3752578)..(3752578): a, c, g or t
  modified_base (3753132)..(3753132): a, c, g or t
  modified_base (3754082)..(3754087): a, c, g or t
  modified_base (3755319)..(3755319): a, c, g or t
  modified_base (3755895)..(3755895): a, c, g or t
  modified_base (3757956)..(3757956): a, c, g or t
  modified_base (3760115)..(3760115): a, c, g or t
  modified_base (3761391)..(3761395): a, c, g or t
  modified_base (3761398)..(3761399): a, c, g or t
  modified_base (3762798)..(3762798): a, c, g or t
  modified_base (3763915)..(3763915): a, c, g or t
  modified_base (3764143)..(3764143): a, c, g or t
  modified_base (3769877)..(3769882): a, c, g or t
  modified_base (3772608)..(3772608): a, c, g or t
  modified_base (3772612)..(3772612): a, c, g or t
  modified_base (3773026)..(3773026): a, c, g or t
  modified_base (3773324)..(3773344): a, c, g or t
  modified_base (3773347)..(3773351): a, c, g or t
  modified_base (3773850)..(3773850): a, c, g or t
  modified_base (3774358)..(3774361): a, c, g or t
  modified_base (3776468)..(3776471): a, c, g or t
  modified_base (3778759)..(3778759): a, c, g or t
  modified_base (3781398)..(3781398): a, c, g or t
  modified_base (3781968)..(3781968): a, c, g or t
  modified_base (3782124)..(3782124): a, c, g or t
  modified_base (3783077)..(3783077): a, c, g or t
  modified_base (3783267)..(3783268): a, c, g or t
  modified_base (3785227)..(3785228): a, c, g or t
  modified_base (3785231)..(3785231): a, c, g or t
  modified_base (3787014)..(3787015): a, c, g or t
  modified_base (3787038)..(3787038): a, c, g or t
  modified_base (3787056)..(3787057): a, c, g or t
  modified_base (3787241)..(3787241): a, c, g or t
  modified_base (3787291)..(3787291): a, c, g or t
  modified_base (3787293)..(3787294): a, c, g or t
  modified_base (3787470)..(3787470): a, c, g or t
  modified_base (3788907)..(3788910): a, c, g or t
  modified_base (3789329)..(3789330): a, c, g or t
  modified_base (3789478)..(3789479): a, c, g or t
  modified_base (3789495)..(3789495): a, c, g or t
  modified_base (3789530)..(3789559): a, c, g or t
  modified_base (3789727)..(3789728): a, c, g or t
  modified_base (3789804)..(3789805): a, c, g or t
  modified_base (3789809)..(3789810): a, c, g or t
  modified_base (3789838)..(3789838): a, c, g or t
  modified_base (3789919)..(3789920): a, c, g or t
  modified_base (3790096)..(3790096): a, c, g or t
  modified_base (3790101)..(3790101): a, c, g or t
  modified_base (3790103)..(3790121): a, c, g or t
  modified_base (3790126)..(3790126): a, c, g or t
  modified_base (3790149)..(3790150): a, c, g or t
  modified_base (3790154)..(3790155): a, c, g or t
  modified_base (3790378)..(3790381): a, c, g or t
  modified_base (3790515)..(3790515): a, c, g or t
  modified_base (3790887)..(3790887): a, c, g or t
  modified_base (3791034)..(3791034): a, c, g or t
  modified_base (3791193)..(3791212): a, c, g or t
  modified_base (3792368)..(3792408): a, c, g or t
  modified_base (3796022)..(3796022): a, c, g or t
  modified_base (3797264)..(3797264): a, c, g or t
  modified_base (3799100)..(3799100): a, c, g or t
  modified_base (3800648)..(3800648): a, c, g or t
  modified_base (3802297)..(3802297): a, c, g or t
  modified_base (3802915)..(3802924): a, c, g or t
  modified_base (3812708)..(3812708): a, c, g or t
  modified_base (3813834)..(3813834): a, c, g or t
  modified_base (3817355)..(3817355): a, c, g or t
  modified_base (3818053)..(3818056): a, c, g or t
  modified_base (3818329)..(3818336): a, c, g or t
  modified_base (3820931)..(3820931): a, c, g or t
  modified_base (3822851)..(3822851): a, c, g or t
  modified_base (3823536)..(3823536): a, c, g or t
  modified_base (3824349)..(3824349): a, c, g or t
  modified_base (3824796)..(3824796): a, c, g or t
  modified_base (3824934)..(3824934): a, c, g or t
  modified_base (3826097)..(3826114): a, c, g or t
  modified_base (3828883)..(3828883): a, c, g or t
  modified_base (3831264)..(3831264): a, c, g or t
  modified_base (3831266)..(3831266): a, c, g or t
  modified_base (3831718)..(3831719): a, c, g or t
  modified_base (3832785)..(3832785): a, c, g or t
  modified_base (3835626)..(3835626): a, c, g or t
  modified_base (3837116)..(3837116): a, c, g or t
  modified_base (3839937)..(3839940): a, c, g or t
  modified_base (3839944)..(3839944): a, c, g or t
  modified_base (3843435)..(3843435): a, c, g or t
  modified_base (3844400)..(3844400): a, c, g or t
  modified_base (3844423)..(3844423): a, c, g or t
  modified_base (3844426)..(3844426): a, c, g or t
  modified_base (3844456)..(3844456): a, c, g or t
  modified_base (3850671)..(3850680): a, c, g or t
  modified_base (3850682)..(3850683): a, c, g or t
  modified_base (3850711)..(3850711): a, c, g or t
  modified_base (3853605)..(3853605): a, c, g or t
  modified_base (3858660)..(3858664): a, c, g or t
  modified_base (3861164)..(3861167): a, c, g or t
  modified_base (3874142)..(3874142): a, c, g or t
  modified_base (3877944)..(3877948): a, c, g or t
  modified_base (3884540)..(3884540): a, c, g or t
  modified_base (3887677)..(3887677): a, c, g or t
  modified_base (3888557)..(3888557): a, c, g or t
  modified_base (3890393)..(3890393): a, c, g or t
  modified_base (3894806)..(3894806): a, c, g or t
  modified_base (3894926)..(3894926): a, c, g or t
  modified_base (3897086)..(3897086): a, c, g or t
  modified_base (3899568)..(3899568): a, c, g or t
  modified_base (3899965)..(3899965): a, c, g or t
  modified_base (3900594)..(3900594): a, c, g or t
  modified_base (3902788)..(3902788): a, c, g or t
  modified_base (3903037)..(3903037): a, c, g or t
  modified_base (3903050)..(3903050): a, c, g or t
  modified_base (3903053)..(3903053): a, c, g or t
  modified_base (3904432)..(3904432): a, c, g or t
  modified_base (3904434)..(3904434): a, c, g or t
  modified_base (3906095)..(3906100): a, c, g or t
  modified_base (3906109)..(3906109): a, c, g or t
  modified_base (3908783)..(3908783): a, c, g or t
  modified_base (3908950)..(3908950): a, c, g or t
  modified_base (3913247)..(3913247): a, c, g or t
  modified_base (3914455)..(3914455): a, c, g or t
  modified_base (3914723)..(3914723): a, c, g or t
  modified_base (3914744)..(3914744): a, c, g or t
  modified_base (3921334)..(3921346): a, c, g or t
  modified_base (3924175)..(3924175): a, c, g or t
  modified_base (3924338)..(3924338): a, c, g or t
  modified_base (3925305)..(3925308): a, c, g or t
  modified_base (3926179)..(3926184): a, c, g or t
  modified_base (3930223)..(3930226): a, c, g or t
  modified_base (3930933)..(3930933): a, c, g or t
  modified_base (3931005)..(3931005): a, c, g or t
  modified_base (3931033)..(3931042): a, c, g or t
  modified_base (3932814)..(3932814): a, c, g or t
  modified_base (3933174)..(3933174): a, c, g or t
  modified_base (3933605)..(3933605): a, c, g or t
  modified_base (3934766)..(3934773): a, c, g or t
  modified_base (3936018)..(3936018): a, c, g or t
  modified_base (3936919)..(3936924): a, c, g or t
  modified_base (3946319)..(3946319): a, c, g or t
  modified_base (3950737)..(3950743): a, c, g or t
  modified_base (3954681)..(3954681): a, c, g or t
  modified_base (3954690)..(3954690): a, c, g or t
  modified_base (3960574)..(3960574): a, c, g or t
  modified_base (3960576)..(3960577): a, c, g or t
  modified_base (3960580)..(3960581): a, c, g or t
  modified_base (3963507)..(3963510): a, c, g or t
  modified_base (3963670)..(3963679): a, c, g or t
  modified_base (3964224)..(3964224): a, c, g or t
  modified_base (3966262)..(3966262): a, c, g or t
  modified_base (3967086)..(3967086): a, c, g or t
  modified_base (3970568)..(3970568): a, c, g or t
  modified_base (3971338)..(3971338): a, c, g or t
  modified_base (3972407)..(3972408): a, c, g or t
  modified_base (3975795)..(3975795): a, c, g or t
  modified_base (3977416)..(3977416): a, c, g or t
  modified_base (3977859)..(3977859): a, c, g or t
  modified_base (3978946)..(3978949): a, c, g or t
  modified_base (3979298)..(3979298): a, c, g or t
  modified_base (3983744)..(3983747): a, c, g or t
  modified_base (3983749)..(3983753): a, c, g or t
  modified_base (3986716)..(3986719): a, c, g or t
  modified_base (3986794)..(3986794): a, c, g or t
  modified_base (3987735)..(3987749): a, c, g or t
  modified_base (3987842)..(3987842): a, c, g or t
  modified_base (3990404)..(3990406): a, c, g or t
  modified_base (3992861)..(3992862): a, c, g or t
  modified_base (3992869)..(3992870): a, c, g or t
  modified_base (3993115)..(3993115): a, c, g or t
  modified_base (3993336)..(3993336): a, c, g or t
  modified_base (3995518)..(3995518): a, c, g or t
  modified_base (3995532)..(3995532): a, c, g or t
  modified_base (3996677)..(3996677): a, c, g or t
  modified_base (3996942)..(3996942): a, c, g or t
  modified_base (3999655)..(3999658): a, c, g or t
  modified_base (4000321)..(4000321): a, c, g or t
  modified_base (4001798)..(4001798): a, c, g or t
  modified_base (4002296)..(4002296): a, c, g or t
  modified_base (4002685)..(4002688): a, c, g or t
  modified_base (4004528)..(4004528): a, c, g or t
  modified_base (4008432)..(4008432): a, c, g or t
  modified_base (4010113)..(4010113): a, c, g or t
  modified_base (4012579)..(4012579): a, c, g or t
  modified_base (4013833)..(4013836): a, c, g or t
  modified_base (4015561)..(4015561): a, c, g or t
  modified_base (4016117)..(4016117): a, c, g or t
  modified_base (4016979)..(4016979): a, c, g or t
  modified_base (4017458)..(4017458): a, c, g or t
  modified_base (4017462)..(4017465): a, c, g or t
  modified_base (4019776)..(4019776): a, c, g or t
  modified_base (4019844)..(4019844): a, c, g or t
  modified_base (4024915)..(4024915): a, c, g or t
  modified_base (4031924)..(4031924): a, c, g or t
  modified_base (4035174)..(4035176): a, c, g or t
  modified_base (4035285)..(4035285): a, c, g or t
  modified_base (4035287)..(4035290): a, c, g or t
  modified_base (4035655)..(4035655): a, c, g or t
  modified_base (4035980)..(4035982): a, c, g or t
  modified_base (4038156)..(4038157): a, c, g or t
  modified_base (4038163)..(4038164): a, c, g or t
  modified_base (4038511)..(4038511): a, c, g or t
  modified_base (4040265)..(4040268): a, c, g or t
  modified_base (4040781)..(4040786): a, c, g or t
  modified_base (4041998)..(4041998): a, c, g or t
  modified_base (4045936)..(4045936): a, c, g or t
  modified_base (4046602)..(4046607): a, c, g or t
  modified_base (4048022)..(4048022): a, c, g or t
  modified_base (4050349)..(4050352): a, c, g or t
  modified_base (4050354)..(4050361): a, c, g or t
  modified_base (4050488)..(4050488): a, c, g or t
  modified_base (4050538)..(4050538): a, c, g or t
  modified_base (4054044)..(4054044): a, c, g or t
  modified_base (4054048)..(4054048): a, c, g or t
  modified_base (4055721)..(4055721): a, c, g or t
  modified_base (4059227)..(4059227): a, c, g or t
  modified_base (4060133)..(4060136): a, c, g or t
  modified_base (4060316)..(4060316): a, c, g or t
  modified_base (4061123)..(4061123): a, c, g or t
  modified_base (4062799)..(4062799): a, c, g or t
  modified_base (4062814)..(4062817): a, c, g or t
  modified_base (4062819)..(4062827): a, c, g or t
  modified_base (4062829)..(4062829): a, c, g or t
  modified_base (4063007)..(4063007): a, c, g or t
  modified_base (4063998)..(4063998): a, c, g or t
  modified_base (4064198)..(4064198): a, c, g or t
  modified_base (4064508)..(4064508): a, c, g or t
  modified_base (4065137)..(4065137): a, c, g or t
  modified_base (4066502)..(4066502): a, c, g or t
  modified_base (4067150)..(4067152): a, c, g or t
  modified_base (4068856)..(4068856): a, c, g or t
  modified_base (4069910)..(4069910): a, c, g or t
  modified_base (4069999)..(4069999): a, c, g or t
  modified_base (4071301)..(4071301): a, c, g or t
  modified_base (4072578)..(4072578): a, c, g or t
  modified_base (4075509)..(4075510): a, c, g or t
  modified_base (4075514)..(4075527): a, c, g or t
  modified_base (4076960)..(4076960): a, c, g or t
  modified_base (4080724)..(4080724): a, c, g or t
  modified_base (4081575)..(4081577): a, c, g or t
  modified_base (4083432)..(4083436): a, c, g or t
  modified_base (4084554)..(4084555): a, c, g or t
  modified_base (4085103)..(4085103): a, c, g or t
  modified_base (4085794)..(4085795): a, c, g or t
  modified_base (4085797)..(4085801): a, c, g or t
  modified_base (4086056)..(4086056): a, c, g or t
  modified_base (4086447)..(4086489): a, c, g or t
  modified_base (4086561)..(4086564): a, c, g or t
  modified_base (4086566)..(4086567): a, c, g or t
  modified_base (4086569)..(4086575): a, c, g or t
  modified_base (4086615)..(4086615): a, c, g or t
  modified_base (4086638)..(4086664): a, c, g or t
  modified_base (4089158)..(4089162): a, c, g or t
  modified_base (4090552)..(4090556): a, c, g or t
  modified_base (4091083)..(4091083): a, c, g or t
  modified_base (4092116)..(4092116): a, c, g or t
  modified_base (4096282)..(4096283): a, c, g or t
  modified_base (4097943)..(4097943): a, c, g or t
  modified_base (4098808)..(4098808): a, c, g or t
  modified_base (4098810)..(4098810): a, c, g or t
  modified_base (4101840)..(4101840): a, c, g or t
  modified_base (4102972)..(4102972): a, c, g or t
  modified_base (4104803)..(4104803): a, c, g or t
  modified_base (4109413)..(4109420): a, c, g or t
  modified_base (4112380)..(4112380): a, c, g or t
  modified_base (4112396)..(4112396): a, c, g or t
  modified_base (4115510)..(4115510): a, c, g or t
  modified_base (4121518)..(4121518): a, c, g or t
  modified_base (4121633)..(4121640): a, c, g or t
  modified_base (4121642)..(4121643): a, c, g or t
  modified_base (4127680)..(4127682): a, c, g or t
  modified_base (4128947)..(4128947): a, c, g or t
  modified_base (4129023)..(4129032): a, c, g or t
  modified_base (4129035)..(4129036): a, c, g or t
  modified_base (4129063)..(4129063): a, c, g or t
  modified_base (4129066)..(4129088): a, c, g or t
  modified_base (4131291)..(4131291): a, c, g or t
  modified_base (4131865)..(4131868): a, c, g or t
  modified_base (4133339)..(4133351): a, c, g or t
  modified_base (4133434)..(4133437): a, c, g or t
  modified_base (4133439)..(4133439): a, c, g or t
  modified_base (4133447)..(4133452): a, c, g or t
  modified_base (4133480)..(4133483): a, c, g or t
  modified_base (4133486)..(4133486): a, c, g or t
  modified_base (4133909)..(4133912): a, c, g or t
  modified_base (4133999)..(4133999): a, c, g or t
  modified_base (4134001)..(4134039): a, c, g or t
  modified_base (4134189)..(4134232): a, c, g or t
  modified_base (4136391)..(4136391): a, c, g or t
  modified_base (4136495)..(4136495): a, c, g or t
  modified_base (4136613)..(4136616): a, c, g or t
  modified_base (4136642)..(4136642): a, c, g or t
  modified_base (4136647)..(4136647): a, c, g or t
  modified_base (4136659)..(4136659): a, c, g or t
  modified_base (4136675)..(4136675): a, c, g or t
  modified_base (4136687)..(4136689): a, c, g or t
  modified_base (4137593)..(4137593): a, c, g or t
  modified_base (4138145)..(4138145): a, c, g or t
  modified_base (4138260)..(4138265): a, c, g or t
  modified_base (4140203)..(4140205): a, c, g or t
  modified_base (4143913)..(4143913): a, c, g or t
  modified_base (4144240)..(4144240): a, c, g or t
  modified_base (4147434)..(4147434): a, c, g or t
  modified_base (4150756)..(4150756): a, c, g or t
  modified_base (4150894)..(4150898): a, c, g or t
  modified_base (4152683)..(4152688): a, c, g or t
  modified_base (4153747)..(4153747): a, c, g or t
  modified_base (4153797)..(4153797): a, c, g or t
  modified_base (4156947)..(4156950): a, c, g or t
  modified_base (4157626)..(4157626): a, c, g or t
  modified_base (4159093)..(4159093): a, c, g or t
  modified_base (4160362)..(4160362): a, c, g or t
  modified_base (4163495)..(4163495): a, c, g or t
  modified_base (4165620)..(4165630): a, c, g or t
  modified_base (4166106)..(4166114): a, c, g or t
  modified_base (4168353)..(4168358): a, c, g or t
  modified_base (4170275)..(4170280): a, c, g or t
  modified_base (4172758)..(4172761): a, c, g or t
  modified_base (4173493)..(4173496): a, c, g or t
  modified_base (4175329)..(4175330): a, c, g or t
  modified_base (4176591)..(4176591): a, c, g or t
  modified_base (4178728)..(4178738): a, c, g or t
  modified_base (4182341)..(4182341): a, c, g or t
  modified_base (4182720)..(4182720): a, c, g or t
  modified_base (4183015)..(4183015): a, c, g or t
  modified_base (4184116)..(4184116): a, c, g or t
  modified_base (4185415)..(4185415): a, c, g or t
  modified_base (4185451)..(4185451): a, c, g or t
  modified_base (4185623)..(4185623): a, c, g or t
  modified_base (4187001)..(4187001): a, c, g or t
  modified_base (4187124)..(4187134): a, c, g or t
  modified_base (4188206)..(4188206): a, c, g or t
  modified_base (4188966)..(4188970): a, c, g or t
  modified_base (4190703)..(4190705): a, c, g or t
  modified_base (4193923)..(4193923): a, c, g or t
  modified_base (4195579)..(4195579): a, c, g or t
  modified_base (4197276)..(4197276): a, c, g or t
  modified_base (4202516)..(4202516): a, c, g or t
  modified_base (4202799)..(4202799): a, c, g or t
  modified_base (4206514)..(4206514): a, c, g or t
  modified_base (4211090)..(4211090): a, c, g or t
  modified_base (4213397)..(4213397): a, c, g or t
  modified_base (4213403)..(4213404): a, c, g or t
  modified_base (4213443)..(4213443): a, c, g or t
  modified_base (4213447)..(4213454): a, c, g or t
  modified_base (4213456)..(4213459): a, c, g or t
  modified_base (4213502)..(4213507): a, c, g or t
  modified_base (4213511)..(4213518): a, c, g or t
  modified_base (4213554)..(4213593): a, c, g or t
  modified_base (4213617)..(4213617): a, c, g or t
  modified_base (4213701)..(4213741): a, c, g or t
  modified_base (4214745)..(4214745): a, c, g or t
  modified_base (4215123)..(4215123): a, c, g or t
  modified_base (4215210)..(4215210): a, c, g or t
  modified_base (4215592)..(4215593): a, c, g or t
  modified_base (4215715)..(4215716): a, c, g or t
  modified_base (4216569)..(4216615): a, c, g or t
  modified_base (4216620)..(4216621): a, c, g or t
  modified_base (4216629)..(4216631): a, c, g or t
  modified_base (4216637)..(4216650): a, c, g or t
  modified_base (4216692)..(4216692): a, c, g or t
  modified_base (4216694)..(4216695): a, c, g or t
  modified_base (4216726)..(4216727): a, c, g or t
  modified_base (4216731)..(4216733): a, c, g or t
  modified_base (4216735)..(4216746): a, c, g or t
  modified_base (4216761)..(4216762): a, c, g or t
  modified_base (4216764)..(4216767): a, c, g or t
  modified_base (4216769)..(4216813): a, c, g or t
  modified_base (4216944)..(4216945): a, c, g or t
  modified_base (4216975)..(4216976): a, c, g or t
  modified_base (4216983)..(4216985): a, c, g or t
  modified_base (4216987)..(4216988): a, c, g or t
  modified_base (4217537)..(4217537): a, c, g or t
  modified_base (4219537)..(4219538): a, c, g or t
  modified_base (4221150)..(4221150): a, c, g or t
  modified_base (4221955)..(4221958): a, c, g or t
  modified_base (4221970)..(4221970): a, c, g or t
  modified_base (4222826)..(4222826): a, c, g or t
  modified_base (4223591)..(4223591): a, c, g or t
  modified_base (4223932)..(4223932): a, c, g or t
  modified_base (4226380)..(4226381): a, c, g or t
  modified_base (4226383)..(4226388): a, c, g or t
  modified_base (4226390)..(4226390): a, c, g or t
  modified_base (4227001)..(4227004): a, c, g or t
  modified_base (4227006)..(4227007): a, c, g or t
  modified_base (4227012)..(4227015): a, c, g or t
  modified_base (4229047)..(4229050): a, c, g or t
  modified_base (4229181)..(4229182): a, c, g or t
  modified_base (4229184)..(4229185): a, c, g or t
  modified_base (4231825)..(4231831): a, c, g or t
  modified_base (4232464)..(4232472): a, c, g or t
  modified_base (4236266)..(4236275): a, c, g or t
  modified_base (4237188)..(4237188): a, c, g or t
  modified_base (4240011)..(4240011): a, c, g or t
  modified_base (4241481)..(4241490): a, c, g or t
  modified_base (4243152)..(4243156): a, c, g or t
  modified_base (4243285)..(4243286): a, c, g or t
  modified_base (4243288)..(4243300): a, c, g or t
  modified_base (4245197)..(4245200): a, c, g or t
  modified_base (4245343)..(4245344): a, c, g or t
  modified_base (4245346)..(4245349): a, c, g or t
  modified_base (4245537)..(4245537): a, c, g or t
  modified_base (4245901)..(4245908): a, c, g or t
  modified_base (4245934)..(4245938): a, c, g or t
  modified_base (4246462)..(4246462): a, c, g or t
  modified_base (4247419)..(4247419): a, c, g or t
  modified_base (4247617)..(4247628): a, c, g or t
  modified_base (4248105)..(4248118): a, c, g or t
  modified_base (4248441)..(4248442): a, c, g or t
  modified_base (4248444)..(4248458): a, c, g or t
  modified_base (4248592)..(4248596): a, c, g or t
  modified_base (4253637)..(4253637): a, c, g or t
  modified_base (4255066)..(4255066): a, c, g or t
  modified_base (4256268)..(4256273): a, c, g or t
  modified_base (4258491)..(4258491): a, c, g or t
  modified_base (4261084)..(4261084): a, c, g or t
  modified_base (4261087)..(4261090): a, c, g or t
  modified_base (4261604)..(4261604): a, c, g or t
  modified_base (4262390)..(4262390): a, c, g or t
  modified_base (4262608)..(4262608): a, c, g or t
  modified_base (4262659)..(4262659): a, c, g or t
  modified_base (4264315)..(4264315): a, c, g or t
  modified_base (4264320)..(4264320): a, c, g or t
  modified_base (4266587)..(4266587): a, c, g or t
  modified_base (4266897)..(4266900): a, c, g or t
  modified_base (4267015)..(4267020): a, c, g or t
  modified_base (4269449)..(4269449): a, c, g or t
  modified_base (4269591)..(4269591): a, c, g or t
  modified_base (4269695)..(4269695): a, c, g or t
  modified_base (4270776)..(4270780): a, c, g or t
  modified_base (4270960)..(4270960): a, c, g or t
  modified_base (4273008)..(4273011): a, c, g or t
  modified_base (4274469)..(4274469): a, c, g or t
  modified_base (4275964)..(4275964): a, c, g or t
  modified_base (4276770)..(4276770): a, c, g or t
  modified_base (4281996)..(4281999): a, c, g or t
  modified_base (4282054)..(4282055): a, c, g or t
  modified_base (4282915)..(4282915): a, c, g or t
  modified_base (4283118)..(4283118): a, c, g or t
  modified_base (4283221)..(4283221): a, c, g or t
  modified_base (4292323)..(4292323): a, c, g or t
  modified_base (4292437)..(4292445): a, c, g or t
  modified_base (4292472)..(4292472): a, c, g or t
  modified_base (4293342)..(4293342): a, c, g or t
  modified_base (4293741)..(4293741): a, c, g or t
  modified_base (4297600)..(4297600): a, c, g or t
  modified_base (4298697)..(4298697): a, c, g or t
  modified_base (4300536)..(4300536): a, c, g or t
  modified_base (4301052)..(4301052): a, c, g or t
  modified_base (4302753)..(4302753): a, c, g or t
  modified_base (4308536)..(4308536): a, c, g or t
  modified_base (4309143)..(4309143): a, c, g or t
  modified_base (4310258)..(4310258): a, c, g or t
  modified_base (4311481)..(4311481): a, c, g or t
  modified_base (4314361)..(4314361): a, c, g or t
  modified_base (4316166)..(4316176): a, c, g or t
  modified_base (4316491)..(4316492): a, c, g or t
  modified_base (4317117)..(4317120): a, c, g or t
  modified_base (4318209)..(4318210): a, c, g or t
  modified_base (4318212)..(4318228): a, c, g or t
  modified_base (4318231)..(4318231): a, c, g or t
  modified_base (4319050)..(4319056): a, c, g or t
  modified_base (4320287)..(4320298): a, c, g or t
  modified_base (4322877)..(4322877): a, c, g or t
  modified_base (4327522)..(4327524): a, c, g or t
  modified_base (4331142)..(4331142): a, c, g or t
  modified_base (4331327)..(4331327): a, c, g or t
  modified_base (4331977)..(4331992): a, c, g or t
  modified_base (4332733)..(4332736): a, c, g or t
  modified_base (4334694)..(4334694): a, c, g or t
  modified_base (4334734)..(4334734): a, c, g or t
  modified_base (4338113)..(4338113): a, c, g or t
  modified_base (4341491)..(4341499): a, c, g or t
  modified_base (4343482)..(4343486): a, c, g or t
  modified_base (4343729)..(4343730): a, c, g or t
  modified_base (4343733)..(4343740): a, c, g or t
  modified_base (4343743)..(4343744): a, c, g or t
  modified_base (4351958)..(4351961): a, c, g or t
  modified_base (4354862)..(4354862): a, c, g or t
  modified_base (4354866)..(4354867): a, c, g or t
  modified_base (4355754)..(4355754): a, c, g or t
  modified_base (4356578)..(4356578): a, c, g or t
  modified_base (4360844)..(4360853): a, c, g or t
  modified_base (4362914)..(4362941): a, c, g or t
  modified_base (4362943)..(4362944): a, c, g or t
  modified_base (4362948)..(4362949): a, c, g or t
  modified_base (4362970)..(4362972): a, c, g or t
  modified_base (4363368)..(4363368): a, c, g or t
  modified_base (4363770)..(4363773): a, c, g or t
  modified_base (4364122)..(4364122): a, c, g or t
  modified_base (4364324)..(4364324): a, c, g or t
  modified_base (4364358)..(4364358): a, c, g or t
  modified_base (4364491)..(4364491): a, c, g or t
  modified_base (4364564)..(4364571): a, c, g or t
  modified_base (4364574)..(4364575): a, c, g or t
  modified_base (4364636)..(4364639): a, c, g or t
  modified_base (4364723)..(4364724): a, c, g or t
  modified_base (4365017)..(4365018): a, c, g or t
  modified_base (4365055)..(4365057): a, c, g or t
  modified_base (4367182)..(4367186): a, c, g or t
  modified_base (4370884)..(4370887): a, c, g or t
  modified_base (4370890)..(4370894): a, c, g or t
  modified_base (4374117)..(4374130): a, c, g or t
  modified_base (4374286)..(4374289): a, c, g or t
  modified_base (4374946)..(4374949): a, c, g or t
  modified_base (4375481)..(4375481): a, c, g or t
  modified_base (4376940)..(4376948): a, c, g or t
  modified_base (4376958)..(4376958): a, c, g or t
  modified_base (4380101)..(4380101): a, c, g or t
  modified_base (4381192)..(4381195): a, c, g or t
  modified_base (4381533)..(4381533): a, c, g or t
  modified_base (4388125)..(4388125): a, c, g or t
  modified_base (4388189)..(4388189): a, c, g or t
  modified_base (4393445)..(4393445): a, c, g or t
  modified_base (4393585)..(4393585): a, c, g or t
  modified_base (4395708)..(4395708): a, c, g or t
  modified_base (4396149)..(4396161): a, c, g or t
  modified_base (4396365)..(4396365): a, c, g or t
  modified_base (4398348)..(4398354): a, c, g or t
  modified_base (4401473)..(4401473): a, c, g or t
  modified_base (4402946)..(4402946): a, c, g or t
  modified_base (4403973)..(4403976): a, c, g or t
  modified_base (4404853)..(4404853): a, c, g or t
  modified_base (4404889)..(4404892): a, c, g or t
  modified_base (4405024)..(4405031): a, c, g or t
  modified_base (4405134)..(4405134): a, c, g or t
  modified_base (4406849)..(4406853): a, c, g or t
  modified_base (4408273)..(4408273): a, c, g or t
  modified_base (4410635)..(4410638): a, c, g or t
  modified_base (4411298)..(4411298): a, c, g or t
  modified_base (4411347)..(4411347): a, c, g or t
  modified_base (4411439)..(4411439): a, c, g or t
  modified_base (4411811)..(4411814): a, c, g or t
  modified_base (4412444)..(4412444): a, c, g or t
  modified_base (4412852)..(4412852): a, c, g or t
  modified_base (4413334)..(4413334): a, c, g or t
  modified_base (4415437)..(4415437): a, c, g or t
  modified_base (4416096)..(4416096): a, c, g or t
  modified_base (4416354)..(4416358): a, c, g or t
  modified_base (4416583)..(4416583): a, c, g or t
  modified_base (4416642)..(4416647): a, c, g or t
  modified_base (4418178)..(4418178): a, c, g or t
  modified_base (4419825)..(4419825): a, c, g or t
  modified_base (4420656)..(4420656): a, c, g or t
  modified_base (4421247)..(4421247): a, c, g or t
  modified_base (4421739)..(4421741): a, c, g or t
  modified_base (4422718)..(4422724): a, c, g or t
  modified_base (4424750)..(4424750): a, c, g or t
  modified_base (4425463)..(4425463): a, c, g or t
  modified_base (4426199)..(4426201): a, c, g or t
  modified_base (4426548)..(4426554): a, c, g or t
  modified_base (4427677)..(4427677): a, c, g or t
  modified_base (4429144)..(4429145): a, c, g or t
  modified_base (4431768)..(4431768): a, c, g or t
  modified_base (4436161)..(4436161): a, c, g or t
  modified_base (4436210)..(4436210): a, c, g or t
  modified_base (4436272)..(4436272): a, c, g or t
  modified_base (4437597)..(4437597): a, c, g or t
  modified_base (4441228)..(4441229): a, c, g or t
  modified_base (4441358)..(4441358): a, c, g or t
  modified_base (4445254)..(4445254): a, c, g or t
  modified_base (4446377)..(4446377): a, c, g or t
  modified_base (4446944)..(4446944): a, c, g or t
  modified_base (4447896)..(4447898): a, c, g or t
  modified_base (4448897)..(4448901): a, c, g or t
  modified_base (4449676)..(4449676): a, c, g or t
  modified_base (4450679)..(4450679): a, c, g or t
  modified_base (4451768)..(4451771): a, c, g or t
  modified_base (4452306)..(4452306): a, c, g or t
  modified_base (4454140)..(4454140): a, c, g or t
  modified_base (4454355)..(4454355): a, c, g or t
  modified_base (4458313)..(4458316): a, c, g or t
  modified_base (4458410)..(4458410): a, c, g or t
  modified_base (4458428)..(4458428): a, c, g or t
  modified_base (4458471)..(4458471): a, c, g or t
  modified_base (4458473)..(4458517): a, c, g or t
  modified_base (4458807)..(4458807): a, c, g or t
  modified_base (4459001)..(4459001): a, c, g or t
  modified_base (4459092)..(4459097): a, c, g or t
  modified_base (4459099)..(4459100): a, c, g or t
  modified_base (4459401)..(4459401): a, c, g or t
  modified_base (4459857)..(4459863): a, c, g or t
  modified_base (4460352)..(4460357): a, c, g or t
  modified_base (4460603)..(4460631): a, c, g or t
  modified_base (4460748)..(4460749): a, c, g or t
  modified_base (4460776)..(4460776): a, c, g or t
  modified_base (4460786)..(4460788): a, c, g or t
  modified_base (4460961)..(4460993): a, c, g or t
  modified_base (4461009)..(4461009): a, c, g or t
  modified_base (4461061)..(4461061): a, c, g or t
  modified_base (4461076)..(4461076): a, c, g or t
  modified_base (4461178)..(4461206): a, c, g or t
  modified_base (4461257)..(4461260): a, c, g or t
  modified_base (4461264)..(4461264): a, c, g or t
  modified_base (4461401)..(4461402): a, c, g or t
  modified_base (4461407)..(4461408): a, c, g or t
  modified_base (4461998)..(4461999): a, c, g or t
  modified_base (4462307)..(4462307): a, c, g or t
  modified_base (4463209)..(4463212): a, c, g or t
  modified_base (4463285)..(4463286): a, c, g or t
  modified_base (4463290)..(4463291): a, c, g or t
  modified_base (4463298)..(4463300): a, c, g or t
  modified_base (4463439)..(4463440): a, c, g or t
  modified_base (4463446)..(4463447): a, c, g or t
  modified_base (4464757)..(4464757): a, c, g or t
  modified_base (4467049)..(4467052): a, c, g or t
  modified_base (4467332)..(4467333): a, c, g or t
  modified_base (4467555)..(4467563): a, c, g or t
  modified_base (4470324)..(4470324): a, c, g or t
  modified_base (4472388)..(4472388): a, c, g or t
  modified_base (4474738)..(4474738): a, c, g or t
  modified_base (4474892)..(4474892): a, c, g or t
  modified_base (4474908)..(4474912): a, c, g or t
  modified_base (4476261)..(4476261): a, c, g or t
  modified_base (4477226)..(4477234): a, c, g or t
  modified_base (4478088)..(4478088): a, c, g or t
  modified_base (4479363)..(4479363): a, c, g or t
  modified_base (4479395)..(4479398): a, c, g or t
  modified_base (4479402)..(4479403): a, c, g or t
  modified_base (4480103)..(4480104): a, c, g or t
  modified_base (4480107)..(4480113): a, c, g or t
  modified_base (4480177)..(4480177): a, c, g or t
  modified_base (4480894)..(4480894): a, c, g or t
  modified_base (4481445)..(4481445): a, c, g or t
  modified_base (4485031)..(4485034): a, c, g or t
  modified_base (4487656)..(4487656): a, c, g or t
  modified_base (4488282)..(4488282): a, c, g or t
  modified_base (4488336)..(4488340): a, c, g or t
  modified_base (4493995)..(4493995): a, c, g or t
  modified_base (4494853)..(4494856): a, c, g or t
  modified_base (4495277)..(4495277): a, c, g or t
  modified_base (4495392)..(4495392): a, c, g or t
  modified_base (4495445)..(4495445): a, c, g or t
  modified_base (4495471)..(4495471): a, c, g or t
  modified_base (4496134)..(4496146): a, c, g or t
  modified_base (4496231)..(4496231): a, c, g or t
  modified_base (4496311)..(4496311): a, c, g or t
  modified_base (4496340)..(4496340): a, c, g or t
  modified_base (4496518)..(4496521): a, c, g or t
  modified_base (4497167)..(4497167): a, c, g or t
  modified_base (4499012)..(4499012): a, c, g or t
  modified_base (4501685)..(4501685): a, c, g or t
  modified_base (4502383)..(4502383): a, c, g or t
  modified_base (4504186)..(4504189): a, c, g or t
  modified_base (4504892)..(4504892): a, c, g or t
  modified_base (4505163)..(4505163): a, c, g or t
  modified_base (4507625)..(4507625): a, c, g or t
  modified_base (4510304)..(4510304): a, c, g or t
  modified_base (4511183)..(4511183): a, c, g or t
  modified_base (4511556)..(4511562): a, c, g or t
  modified_base (4511996)..(4512004): a, c, g or t
  modified_base (4512561)..(4512563): a, c, g or t
  modified_base (4515950)..(4515950): a, c, g or t
  modified_base (4516205)..(4516205): a, c, g or t
  modified_base (4516949)..(4516952): a, c, g or t
  modified_base (4518733)..(4518733): a, c, g or t
  modified_base (4521693)..(4521698): a, c, g or t
  modified_base (4521759)..(4521806): a, c, g or t
  modified_base (4522230)..(4522231): a, c, g or t
  modified_base (4522774)..(4522774): a, c, g or t
  modified_base (4523685)..(4523685): a, c, g or t
  modified_base (4531418)..(4531418): a, c, g or t
  modified_base (4533797)..(4533797): a, c, g or t
  modified_base (4536652)..(4536653): a, c, g or t
  modified_base (4536932)..(4536932): a, c, g or t
  modified_base (4537462)..(4537462): a, c, g or t
  modified_base (4537467)..(4537467): a, c, g or t
  modified_base (4538314)..(4538314): a, c, g or t
  modified_base (4538398)..(4538398): a, c, g or t
  modified_base (4538767)..(4538770): a, c, g or t
  modified_base (4538772)..(4538773): a, c, g or t
  modified_base (4538943)..(4538943): a, c, g or t
  modified_base (4538966)..(4538966): a, c, g or t
  modified_base (4542381)..(4542381): a, c, g or t
  modified_base (4542384)..(4542384): a, c, g or t
  modified_base (4542732)..(4542733): a, c, g or t
  modified_base (4545446)..(4545446): a, c, g or t
  modified_base (4548671)..(4548671): a, c, g or t
  modified_base (4551545)..(4551548): a, c, g or t
  modified_base (4554481)..(4554481): a, c, g or t
  modified_base (4556026)..(4556035): a, c, g or t
  modified_base (4556221)..(4556221): a, c, g or t
  modified_base (4556287)..(4556287): a, c, g or t
  modified_base (4556320)..(4556320): a, c, g or t
  modified_base (4556770)..(4556771): a, c, g or t
  modified_base (4556853)..(4556856): a, c, g or t
  modified_base (4556859)..(4556860): a, c, g or t
  modified_base (4556889)..(4556890): a, c, g or t
  modified_base (4556943)..(4556944): a, c, g or t
  modified_base (4557115)..(4557116): a, c, g or t
  modified_base (4557201)..(4557201): a, c, g or t
  modified_base (4557233)..(4557256): a, c, g or t
  modified_base (4557358)..(4557358): a, c, g or t
  modified_base (4558200)..(4558203): a, c, g or t
  modified_base (4558223)..(4558223): a, c, g or t
  modified_base (4559301)..(4559301): a, c, g or t
  modified_base (4559394)..(4559399): a, c, g or t
  modified_base (4559401)..(4559401): a, c, g or t
  modified_base (4559403)..(4559404): a, c, g or t
  modified_base (4559406)..(4559407): a, c, g or t
  modified_base (4559432)..(4559433): a, c, g or t
  modified_base (4559583)..(4559592): a, c, g or t
  modified_base (4559706)..(4559709): a, c, g or t
  modified_base (4559716)..(4559717): a, c, g or t
  modified_base (4559742)..(4559742): a, c, g or t
  modified_base (4559802)..(4559802): a, c, g or t
  modified_base (4561687)..(4561687): a, c, g or t
  modified_base (4568848)..(4568848): a, c, g or t
  modified_base (4568936)..(4568936): a, c, g or t
  modified_base (4569474)..(4569474): a, c, g or t
  modified_base (4571100)..(4571100): a, c, g or t
  modified_base (4571204)..(4571207): a, c, g or t
  modified_base (4571210)..(4571210): a, c, g or t
  modified_base (4571730)..(4571730): a, c, g or t
  modified_base (4573383)..(4573386): a, c, g or t
  modified_base (4574101)..(4574101): a, c, g or t
  modified_base (4574287)..(4574287): a, c, g or t
  modified_base (4574457)..(4574457): a, c, g or t
  modified_base (4581485)..(4581485): a, c, g or t
  modified_base (4583353)..(4583353): a, c, g or t
  modified_base (4586235)..(4586235): a, c, g or t
  modified_base (4588123)..(4588123): a, c, g or t
  modified_base (4588390)..(4588390): a, c, g or t
  modified_base (4594950)..(4594950): a, c, g or t
  modified_base (4597813)..(4597813): a, c, g or t
  modified_base (4598154)..(4598154): a, c, g or t
  modified_base (4598219)..(4598219): a, c, g or t
  modified_base (4599388)..(4599393): a, c, g or t
  modified_base (4600518)..(4600518): a, c, g or t
  modified_base (4602868)..(4602869): a, c, g or t
  modified_base (4603707)..(4603707): a, c, g or t
  modified_base (4603745)..(4603745): a, c, g or t
  modified_base (4604137)..(4604141): a, c, g or t
  modified_base (4604767)..(4604767): a, c, g or t
  modified_base (4605228)..(4605243): a, c, g or t
  modified_base (4605248)..(4605248): a, c, g or t
  modified_base (4605351)..(4605351): a, c, g or t
  modified_base (4605462)..(4605462): a, c, g or t
  modified_base (4605629)..(4605629): a, c, g or t
  modified_base (4605637)..(4605661): a, c, g or t
  modified_base (4605860)..(4605860): a, c, g or t
  modified_base (4606676)..(4606676): a, c, g or t
  modified_base (4606739)..(4606739): a, c, g or t
  modified_base (4607002)..(4607011): a, c, g or t
  modified_base (4607131)..(4607131): a, c, g or t
  modified_base (4618531)..(4618531): a, c, g or t
  modified_base (4620266)..(4620266): a, c, g or t
  modified_base (4621596)..(4621596): a, c, g or t
  modified_base (4623219)..(4623219): a, c, g or t
  modified_base (4626818)..(4626818): a, c, g or t
  modified_base (4628031)..(4628031): a, c, g or t
  modified_base (4628270)..(4628278): a, c, g or t
  modified_base (4628760)..(4628760): a, c, g or t
  modified_base (4630259)..(4630259): a, c, g or t
  modified_base (4630262)..(4630262): a, c, g or t
  modified_base (4630290)..(4630290): a, c, g or t
  modified_base (4630335)..(4630335): a, c, g or t
  modified_base (4630352)..(4630352): a, c, g or t
  modified_base (4630363)..(4630363): a, c, g or t
  modified_base (4630387)..(4630387): a, c, g or t
  modified_base (4630454)..(4630454): a, c, g or t
  modified_base (4630471)..(4630471): a, c, g or t
  modified_base (4631267)..(4631267): a, c, g or t
  modified_base (4631792)..(4631795): a, c, g or t
  modified_base (4632635)..(4632641): a, c, g or t
  modified_base (4632841)..(4632841): a, c, g or t
  modified_base (4633122)..(4633122): a, c, g or t
  modified_base (4634836)..(4634836): a, c, g or t
  modified_base (4635592)..(4635592): a, c, g or t
  modified_base (4636546)..(4636546): a, c, g or t
  modified_base (4636930)..(4636930): a, c, g or t
  modified_base (4636974)..(4636977): a, c, g or t
  modified_base (4638811)..(4638811): a, c, g or t
  modified_base (4638813)..(4638817): a, c, g or t
  modified_base (4639146)..(4639146): a, c, g or t
  modified_base (4639148)..(4639148): a, c, g or t
  modified_base (4640127)..(4640127): a, c, g or t
  modified_base (4640811)..(4640811): a, c, g or t
  modified_base (4641710)..(4641710): a, c, g or t
  modified_base (4642331)..(4642331): a, c, g or t
  modified_base (4642888)..(4642888): a, c, g or t
  modified_base (4643741)..(4643747): a, c, g or t
  modified_base (4644068)..(4644068): a, c, g or t
  modified_base (4644475)..(4644475): a, c, g or t
  modified_base (4644483)..(4644484): a, c, g or t
  modified_base (4644490)..(4644494): a, c, g or t
  modified_base (4644615)..(4644615): a, c, g or t
  modified_base (4644632)..(4644635): a, c, g or t
  modified_base (4644885)..(4644885): a, c, g or t
  modified_base (4644949)..(4644951): a, c, g or t
  modified_base (4644954)..(4644957): a, c, g or t
  modified_base (4645067)..(4645067): a, c, g or t
  modified_base (4645154)..(4645154): a, c, g or t
  modified_base (4645223)..(4645223): a, c, g or t
  modified_base (4645231)..(4645231): a, c, g or t
  modified_base (4645239)..(4645240): a, c, g or t
  modified_base (4645259)..(4645259): a, c, g or t
  modified_base (4645357)..(4645358): a, c, g or t
  modified_base (4645643)..(4645643): a, c, g or t
  modified_base (4645774)..(4645774): a, c, g or t
  modified_base (4645778)..(4645778): a, c, g or t
  modified_base (4645860)..(4645860): a, c, g or t
  modified_base (4646048)..(4646048): a, c, g or t
  modified_base (4646237)..(4646238): a, c, g or t
  modified_base (4646241)..(4646242): a, c, g or t
  modified_base (4646244)..(4646245): a, c, g or t
  modified_base (4646249)..(4646250): a, c, g or t
  modified_base (4646258)..(4646268): a, c, g or t
  modified_base (4646362)..(4646372): a, c, g or t
  modified_base (4646473)..(4646473): a, c, g or t
  modified_base (4646527)..(4646528): a, c, g or t
  modified_base (4646715)..(4646716): a, c, g or t
  modified_base (4646726)..(4646729): a, c, g or t
  modified_base (4646731)..(4646733): a, c, g or t
  modified_base (4646736)..(4646737): a, c, g or t
  modified_base (4646739)..(4646740): a, c, g or t
  modified_base (4646763)..(4646763): a, c, g or t
  modified_base (4646773)..(4646773): a, c, g or t
  modified_base (4647115)..(4647115): a, c, g or t
  modified_base (4647256)..(4647259): a, c, g or t
  modified_base (4647336)..(4647336): a, c, g or t
  modified_base (4647339)..(4647346): a, c, g or t
  modified_base (4647349)..(4647349): a, c, g or t
  modified_base (4647982)..(4647982): a, c, g or t
  modified_base (4648148)..(4648148): a, c, g or t
  modified_base (4648243)..(4648243): a, c, g or t
  modified_base (4648275)..(4648275): a, c, g or t
  modified_base (4648297)..(4648297): a, c, g or t
  modified_base (4651015)..(4651015): a, c, g or t
  modified_base (4653034)..(4653034): a, c, g or t
  modified_base (4656893)..(4656893): a, c, g or t
  modified_base (4656899)..(4656899): a, c, g or t
  modified_base (4657711)..(4657711): a, c, g or t
  modified_base (4657713)..(4657713): a, c, g or t
  modified_base (4658388)..(4658392): a, c, g or t
  modified_base (4659301)..(4659301): a, c, g or t
  modified_base (4659813)..(4659813): a, c, g or t
  modified_base (4662261)..(4662270): a, c, g or t
  modified_base (4663527)..(4663533): a, c, g or t
  modified_base (4664404)..(4664411): a, c, g or t
  modified_base (4664421)..(4664421): a, c, g or t
  modified_base (4669178)..(4669178): a, c, g or t
  modified_base (4670193)..(4670196): a, c, g or t
  modified_base (4670344)..(4670344): a, c, g or t
  modified_base (4671254)..(4671254): a, c, g or t
  modified_base (4671824)..(4671826): a, c, g or t
  modified_base (4673089)..(4673089): a, c, g or t
  modified_base (4675090)..(4675090): a, c, g or t
  modified_base (4677206)..(4677206): a, c, g or t
  modified_base (4678188)..(4678188): a, c, g or t
  modified_base (4679677)..(4679677): a, c, g or t
  modified_base (4679996)..(4679996): a, c, g or t
  modified_base (4680252)..(4680252): a, c, g or t
  modified_base (4681440)..(4681440): a, c, g or t
  modified_base (4681510)..(4681510): a, c, g or t
  modified_base (4685923)..(4685923): a, c, g or t
  modified_base (4686494)..(4686494): a, c, g or t
  modified_base (4687469)..(4687469): a, c, g or t
  modified_base (4691197)..(4691200): a, c, g or t
  modified_base (4691767)..(4691767): a, c, g or t
  modified_base (4691973)..(4691973): a, c, g or t
  modified_base (4692301)..(4692305): a, c, g or t
  modified_base (4692542)..(4692553): a, c, g or t
  modified_base (4693608)..(4693614): a, c, g or t
  modified_base (4695026)..(4695026): a, c, g or t
  modified_base (4695238)..(4695238): a, c, g or t
  modified_base (4696932)..(4696932): a, c, g or t
  modified_base (4696949)..(4696949): a, c, g or t
  modified_base (4699645)..(4699645): a, c, g or t
  modified_base (4701250)..(4701250): a, c, g or t
  modified_base (4701645)..(4701645): a, c, g or t
  modified_base (4702918)..(4702918): a, c, g or t
  modified_base (4702930)..(4702933): a, c, g or t
  modified_base (4702937)..(4702938): a, c, g or t
  modified_base (4704254)..(4704254): a, c, g or t
  modified_base (4704830)..(4704830): a, c, g or t
  modified_base (4704944)..(4704944): a, c, g or t
  modified_base (4705360)..(4705363): a, c, g or t
  modified_base (4706472)..(4706472): a, c, g or t
  modified_base (4706860)..(4706860): a, c, g or t
  modified_base (4709924)..(4709924): a, c, g or t
  modified_base (4710191)..(4710195): a, c, g or t
  modified_base (4712026)..(4712026): a, c, g or t
  modified_base (4714400)..(4714400): a, c, g or t
  modified_base (4715141)..(4715144): a, c, g or t
  modified_base (4715349)..(4715349): a, c, g or t
  modified_base (4716112)..(4716112): a, c, g or t
  modified_base (4716835)..(4716835): a, c, g or t
  modified_base (4716944)..(4716956): a, c, g or t
  modified_base (4716958)..(4716958): a, c, g or t
  modified_base (4718015)..(4718015): a, c, g or t
  modified_base (4718292)..(4718294): a, c, g or t
  modified_base (4721666)..(4721666): a, c, g or t
  modified_base (4726503)..(4726503): a, c, g or t
  modified_base (4726525)..(4726525): a, c, g or t
  modified_base (4727190)..(4727190): a, c, g or t
  modified_base (4727625)..(4727628): a, c, g or t
  modified_base (4729704)..(4729704): a, c, g or t
  modified_base (4729894)..(4729894): a, c, g or t
  modified_base (4730404)..(4730404): a, c, g or t
  modified_base (4730790)..(4730790): a, c, g or t
  modified_base (4732839)..(4732839): a, c, g or t
  modified_base (4734617)..(4734617): a, c, g or t
  modified_base (4736408)..(4736408): a, c, g or t
  modified_base (4736893)..(4736894): a, c, g or t
  modified_base (4738377)..(4738377): a, c, g or t
  modified_base (4739858)..(4739859): a, c, g or t
  modified_base (4739862)..(4739862): a, c, g or t
  modified_base (4740175)..(4740190): a, c, g or t
  modified_base (4741711)..(4741712): a, c, g or t
  modified_base (4741715)..(4741717): a, c, g or t
  modified_base (4742996)..(4742996): a, c, g or t
  modified_base (4745736)..(4745736): a, c, g or t
  modified_base (4746833)..(4746833): a, c, g or t
  modified_base (4748007)..(4748007): a, c, g or t
  modified_base (4748092)..(4748092): a, c, g or t
  modified_base (4748104)..(4748104): a, c, g or t
  modified_base (4749654)..(4749657): a, c, g or t
  modified_base (4750216)..(4750216): a, c, g or t
  modified_base (4751378)..(4751381): a, c, g or t
  modified_base (4751483)..(4751487): a, c, g or t
  modified_base (4752733)..(4752733): a, c, g or t
  modified_base (4752908)..(4752908): a, c, g or t
  modified_base (4753551)..(4753554): a, c, g or t
  modified_base (4753831)..(4753831): a, c, g or t
  modified_base (4754330)..(4754330): a, c, g or t
  modified_base (4754542)..(4754543): a, c, g or t
  modified_base (4754821)..(4754821): a, c, g or t
  modified_base (4754995)..(4754995): a, c, g or t
  modified_base (4755290)..(4755293): a, c, g or t
  modified_base (4755845)..(4755848): a, c, g or t
  modified_base (4756004)..(4756007): a, c, g or t
  modified_base (4757654)..(4757654): a, c, g or t
  modified_base (4757656)..(4757656): a, c, g or t
  modified_base (4757676)..(4757676): a, c, g or t
  modified_base (4757680)..(4757680): a, c, g or t
  modified_base (4758871)..(4758874): a, c, g or t
  modified_base (4759066)..(4759066): a, c, g or t
  modified_base (4759254)..(4759255): a, c, g or t
  modified_base (4759755)..(4759759): a, c, g or t
  modified_base (4759908)..(4759909): a, c, g or t
  modified_base (4761954)..(4761961): a, c, g or t
  modified_base (4761963)..(4761964): a, c, g or t
  modified_base (4761968)..(4761969): a, c, g or t
  modified_base (4762341)..(4762341): a, c, g or t
  modified_base (4762838)..(4762838): a, c, g or t
  modified_base (4769207)..(4769208): a, c, g or t
  modified_base (4769218)..(4769251): a, c, g or t
  modified_base (4769255)..(4769256): a, c, g or t
  modified_base (4769270)..(4769271): a, c, g or t
  modified_base (4769280)..(4769290): a, c, g or t
  modified_base (4769294)..(4769295): a, c, g or t
  modified_base (4769297)..(4769300): a, c, g or t
  modified_base (4774614)..(4774614): a, c, g or t
  modified_base (4781007)..(4781016): a, c, g or t
  modified_base (4781113)..(4781113): a, c, g or t
  modified_base (4781117)..(4781117): a, c, g or t
  modified_base (4782781)..(4782781): a, c, g or t
  modified_base (4783224)..(4783224): a, c, g or t
  modified_base (4783571)..(4783575): a, c, g or t
  modified_base (4783760)..(4783760): a, c, g or t
  modified_base (4785295)..(4785295): a, c, g or t
  modified_base (4786260)..(4786260): a, c, g or t
  modified_base (4786512)..(4786512): a, c, g or t
  modified_base (4789280)..(4789280): a, c, g or t
  modified_base (4789840)..(4789840): a, c, g or t
  modified_base (4795881)..(4795884): a, c, g or t
  modified_base (4797539)..(4797539): a, c, g or t
  modified_base (4801406)..(4801406): a, c, g or t
  modified_base (4802288)..(4802288): a, c, g or t
  modified_base (4803240)..(4803259): a, c, g or t
  modified_base (4809295)..(4809295): a, c, g or t
  modified_base (4809566)..(4809566): a, c, g or t
  modified_base (4810662)..(4810662): a, c, g or t
  modified_base (4811126)..(4811126): a, c, g or t
  modified_base (4814450)..(4814450): a, c, g or t
  modified_base (4815583)..(4815583): a, c, g or t
  modified_base (4815680)..(4815680): a, c, g or t
  modified_base (4816208)..(4816208): a, c, g or t
  modified_base (4816350)..(4816350): a, c, g or t
  modified_base (4816853)..(4816860): a, c, g or t
  modified_base (4816862)..(4816863): a, c, g or t
  modified_base (4817509)..(4817509): a, c, g or t
  modified_base (4817578)..(4817578): a, c, g or t
  modified_base (4818391)..(4818391): a, c, g or t
  modified_base (4820264)..(4820264): a, c, g or t
  modified_base (4821794)..(4821794): a, c, g or t
  modified_base (4821959)..(4821959): a, c, g or t
  modified_base (4829179)..(4829179): a, c, g or t
  modified_base (4831182)..(4831185): a, c, g or t
  modified_base (4834111)..(4834111): a, c, g or t
  modified_base (4834127)..(4834129): a, c, g or t
  modified_base (4834277)..(4834277): a, c, g or t
  modified_base (4834343)..(4834365): a, c, g or t
  modified_base (4834379)..(4834380): a, c, g or t
  modified_base (4834384)..(4834401): a, c, g or t
  modified_base (4834458)..(4834459): a, c, g or t
  modified_base (4834482)..(4834483): a, c, g or t
  modified_base (4836403)..(4836403): a, c, g or t
  modified_base (4837372)..(4837373): a, c, g or t
  modified_base (4839202)..(4839202): a, c, g or t
  modified_base (4839936)..(4839936): a, c, g or t
  modified_base (4841162)..(4841165): a, c, g or t
  modified_base (4846438)..(4846438): a, c, g or t
  modified_base (4846569)..(4846569): a, c, g or t
  modified_base (4847843)..(4847843): a, c, g or t
  modified_base (4848221)..(4848221): a, c, g or t
  modified_base (4849385)..(4849389): a, c, g or t
  modified_base (4849922)..(4849922): a, c, g or t
  modified_base (4850412)..(4850412): a, c, g or t
  modified_base (4850715)..(4850715): a, c, g or t
  modified_base (4851226)..(4851226): a, c, g or t
  modified_base (4851326)..(4851326): a, c, g or t
  modified_base (4851907)..(4851908): a, c, g or t
  modified_base (4852206)..(4852207): a, c, g or t
  modified_base (4853174)..(4853174): a, c, g or t
  modified_base (4854395)..(4854395): a, c, g or t
  modified_base (4854397)..(4854403): a, c, g or t
  modified_base (4854794)..(4854794): a, c, g or t
  modified_base (4855537)..(4855537): a, c, g or t
  modified_base (4856489)..(4856493): a, c, g or t
  modified_base (4857233)..(4857239): a, c, g or t
  modified_base (4859517)..(4859517): a, c, g or t
  modified_base (4861585)..(4861585): a, c, g or t
  modified_base (4862502)..(4862502): a, c, g or t
  modified_base (4863195)..(4863196): a, c, g or t
  modified_base (4866323)..(4866323): a, c, g or t
  modified_base (4869325)..(4869331): a, c, g or t
  modified_base (4873121)..(4873121): a, c, g or t
  modified_base (4876971)..(4876971): a, c, g or t
  modified_base (4877861)..(4877861): a, c, g or t
  modified_base (4882229)..(4882229): a, c, g or t
  modified_base (4882642)..(4882642): a, c, g or t
  modified_base (4883418)..(4883419): a, c, g or t
  modified_base (4883426)..(4883427): a, c, g or t
  modified_base (4883617)..(4883617): a, c, g or t
  modified_base (4883620)..(4883620): a, c, g or t
  modified_base (4886094)..(4886094): a, c, g or t
  modified_base (4888352)..(4888352): a, c, g or t
  modified_base (4888354)..(4888354): a, c, g or t
  modified_base (4888573)..(4888573): a, c, g or t
  modified_base (4889474)..(4889476): a, c, g or t
  modified_base (4896925)..(4896925): a, c, g or t
  modified_base (4903073)..(4903073): a, c, g or t
  modified_base (4906721)..(4906721): a, c, g or t
  modified_base (4906736)..(4906736): a, c, g or t
  modified_base (4906757)..(4906757): a, c, g or t
  modified_base (4907189)..(4907189): a, c, g or t
  modified_base (4908415)..(4908421): a, c, g or t
  modified_base (4908590)..(4908590): a, c, g or t
  modified_base (4910844)..(4910844): a, c, g or t
  modified_base (4912269)..(4912281): a, c, g or t
  modified_base (4912316)..(4912316): a, c, g or t
  modified_base (4912957)..(4912957): a, c, g or t
  modified_base (4914525)..(4914525): a, c, g or t
  modified_base (4915920)..(4915920): a, c, g or t
  modified_base (4918164)..(4918164): a, c, g or t
  modified_base (4918193)..(4918193): a, c, g or t
  modified_base (4919475)..(4919475): a, c, g or t
  modified_base (4919709)..(4919709): a, c, g or t
  modified_base (4919711)..(4919714): a, c, g or t
  modified_base (4919718)..(4919738): a, c, g or t
  modified_base (4919742)..(4919743): a, c, g or t
  modified_base (4919765)..(4919766): a, c, g or t
  modified_base (4919770)..(4919771): a, c, g or t
  modified_base (4920740)..(4920740): a, c, g or t
  modified_base (4922747)..(4922747): a, c, g or t
  modified_base (4922890)..(4922890): a, c, g or t
  modified_base (4929724)..(4929724): a, c, g or t
  modified_base (4931331)..(4931331): a, c, g or t
  modified_base (4933181)..(4933181): a, c, g or t
  modified_base (4934740)..(4934741): a, c, g or t
  modified_base (4935387)..(4935387): a, c, g or t
  modified_base (4936631)..(4936639): a, c, g or t
  modified_base (4936671)..(4936673): a, c, g or t
  modified_base (4936675)..(4936675): a, c, g or t
  modified_base (4937008)..(4937008): a, c, g or t
  modified_base (4937066)..(4937066): a, c, g or t
  modified_base (4937691)..(4937691): a, c, g or t
  modified_base (4940942)..(4940942): a, c, g or t
  modified_base (4944373)..(4944379): a, c, g or t
  modified_base (4951563)..(4951564): a, c, g or t
  modified_base (4953804)..(4953804): a, c, g or t
  modified_base (4954702)..(4954702): a, c, g or t
  modified_base (4966953)..(4966953): a, c, g or t
  modified_base (4967260)..(4967260): a, c, g or t
  modified_base (4967440)..(4967440): a, c, g or t
  modified_base (4967542)..(4967542): a, c, g or t
  modified_base (4967621)..(4967621): a, c, g or t
  modified_base (4967849)..(4967849): a, c, g or t
  modified_base (4968478)..(4968481): a, c, g or t
  modified_base (4969535)..(4969535): a, c, g or t
  modified_base (4973136)..(4973136): a, c, g or t
  modified_base (4973607)..(4973607): a, c, g or t
  modified_base (4973614)..(4973615): a, c, g or t
  modified_base (4974514)..(4974514): a, c, g or t
  modified_base (4974537)..(4974537): a, c, g or t
  modified_base (4974570)..(4974570): a, c, g or t
  modified_base (4974586)..(4974586): a, c, g or t
  modified_base (4975554)..(4975606): a, c, g or t
  modified_base (4976482)..(4976482): a, c, g or t
  modified_base (4976644)..(4976647): a, c, g or t
  modified_base (4976653)..(4976654): a, c, g or t
  modified_base (4979874)..(4979874): a, c, g or t
  modified_base (4985639)..(4985639): a, c, g or t
  modified_base (4987280)..(4987280): a, c, g or t
  modified_base (4987385)..(4987385): a, c, g or t
  modified_base (4987396)..(4987396): a, c, g or t
  modified_base (4988127)..(4988132): a, c, g or t
  modified_base (4989566)..(4989567): a, c, g or t
  modified_base (4991569)..(4991569): a, c, g or t
  modified_base (4993896)..(4993896): a, c, g or t
  modified_base (4993898)..(4993899): a, c, g or t
  modified_base (4995272)..(4995272): a, c, g or t
  modified_base (4996029)..(4996029): a, c, g or t
  modified_base (4999074)..(4999074): a, c, g or t
  modified_base (5002571)..(5002572): a, c, g or t
  modified_base (5002845)..(5002845): a, c, g or t
  modified_base (5004849)..(5004849): a, c, g or t
  modified_base (5005001)..(5005001): a, c, g or t
  modified_base (5005448)..(5005449): a, c, g or t
  modified_base (5005753)..(5005753): a, c, g or t
  modified_base (5006149)..(5006153): a, c, g or t
  modified_base (5007387)..(5007387): a, c, g or t
  modified_base (5009336)..(5009336): a, c, g or t
  modified_base (5010081)..(5010081): a, c, g or t
  modified_base (5010759)..(5010760): a, c, g or t
  modified_base (5010762)..(5010775): a, c, g or t
  modified_base (5011377)..(5011377): a, c, g or t
  modified_base (5022286)..(5022287): a, c, g or t
  modified_base (5022289)..(5022292): a, c, g or t
  modified_base (5026645)..(5026645): a, c, g or t
  modified_base (5028789)..(5028789): a, c, g or t
  modified_base (5029183)..(5029183): a, c, g or t
  modified_base (5031014)..(5031014): a, c, g or t
  modified_base (5031763)..(5031763): a, c, g or t
  modified_base (5033384)..(5033384): a, c, g or t
  modified_base (5033390)..(5033390): a, c, g or t
  modified_base (5042026)..(5042029): a, c, g or t
  modified_base (5042314)..(5042315): a, c, g or t
  modified_base (5047795)..(5047798): a, c, g or t
  modified_base (5047928)..(5047933): a, c, g or t
  modified_base (5050187)..(5050187): a, c, g or t
  modified_base (5050190)..(5050191): a, c, g or t
  modified_base (5050221)..(5050221): a, c, g or t
  modified_base (5050224)..(5050224): a, c, g or t
  modified_base (5050288)..(5050288): a, c, g or t
  modified_base (5051195)..(5051195): a, c, g or t
  modified_base (5051586)..(5051592): a, c, g or t
  modified_base (5051601)..(5051601): a, c, g or t
  modified_base (5051915)..(5051915): a, c, g or t
  modified_base (5053615)..(5053617): a, c, g or t
  modified_base (5053807)..(5053807): a, c, g or t
  modified_base (5057347)..(5057347): a, c, g or t
  modified_base (5057940)..(5057946): a, c, g or t
  modified_base (5058034)..(5058034): a, c, g or t
  modified_base (5060175)..(5060175): a, c, g or t
  modified_base (5060281)..(5060281): a, c, g or t
  modified_base (5060562)..(5060562): a, c, g or t
  modified_base (5060675)..(5060675): a, c, g or t
  modified_base (5063785)..(5063787): a, c, g or t
  modified_base (5068547)..(5068547): a, c, g or t
  modified_base (5068600)..(5068600): a, c, g or t
  modified_base (5068606)..(5068606): a, c, g or t
  modified_base (5068613)..(5068617): a, c, g or t
  modified_base (5071057)..(5071060): a, c, g or t
  modified_base (5071934)..(5071934): a, c, g or t
  modified_base (5072001)..(5072001): a, c, g or t
  modified_base (5072903)..(5072903): a, c, g or t
  modified_base (5073101)..(5073101): a, c, g or t
  modified_base (5074263)..(5074271): a, c, g or t
  modified_base (5075370)..(5075371): a, c, g or t
  modified_base (5075373)..(5075376): a, c, g or t
  modified_base (5075388)..(5075389): a, c, g or t
  modified_base (5075434)..(5075445): a, c, g or t
  modified_base (5075575)..(5075578): a, c, g or t
  modified_base (5075584)..(5075584): a, c, g or t
  modified_base (5075822)..(5075825): a, c, g or t
  modified_base (5075889)..(5075890): a, c, g or t
  modified_base (5076338)..(5076338): a, c, g or t
  modified_base (5076354)..(5076356): a, c, g or t
tttacccgatcaacagcaaagataaaaacgatgaaatcgtcagcatgctcggggccagctatttccgcgtgattggtgcaggtcaggtttatggcctttctgcccgcggtctggcaattgataccgccttgccatcgggtgaagaatttccacgcttcaaagagttctggatcgagcgtccaaaaccaactgataaacgtttaaccatttatgcattgcttgactcgccgcgcgcgacaggtgcttacaaattcgtagttatgccagggcgtgacacggttgtggatgtgcagtcgaaaatctatctgcgcgataaagtcggcaaactgggggttgcaccgttaaccagtatgttcctgtttgggccgaaccaaccgtcgccagcaaataactatcgtccggagttgcacgactctaacggtctctctatccatgccggtaatggcgaatggatctggcgtccgttgaataacccgaaacatttagcggtcagcagcttctccatggaaaacccgcaaggctttggtctgttgcagcgcggtcgtgatttctcccgctttgaagatctcgatgatcgttacgatctccgtccaagcgcatgggtgactccgaaaggggagtggggtaaaggcagcgttgagctggtggaaattccaaccaacgatgaaactaacgataacatcgtcgcttactggacgccggatcagctgccggagccgggtaaagagatgaactttaaatacaccatcaccttcagccgtgatgaagacaaactgcatgcgccagataacgcatgggtgcaacaaacgcgtcgttcaacgggggatgtgaagcagtcgaacctgattcgccagcctgacggtactatcgcctttgtggtcgattttaccggcgcagagatgaaaaaactgccagaggataccccggtcacagcgcaaaccagcattggtgataatggtgagatagttgaaagcacggtgcgctataacccggtcaccaaaggctggcgtctggtgatgcgtgtgaaagtgaaagatgccaagaaaaccactgaaatgcgcgctgcgctggtgaatgccgatcagacgttgagtgaaacctggagctaccagttacctgccaatgaataagacaactgagtacattgacgcaatgcccatcgccgcaagcgagaaagcggcattgccgaagactgatatccgcgccgttcatcaggcgctggatgccgaacaccgcacctgggcgcgggaggatgactccccgcaaggctcggtaaaggcgcgtctggaacaagcctggccagattcacttgctgatggacagttaattaaagatgacgaagggcgcgatcagcttaaggcgatgccagaagcaaaacgctcctcgatgtttcccgacccgtggcgtaccaacccggtaggccgtttctgggatcgcctgcgtggacgcgatgtaacaccgcgctatctggctcgtttgaccaaagaagagcaggagagcgagcaaaagtggcgtaccgtcggtaccatccgccgttacattctgttgatcctgacgctcgcgcaaactgtcgtcgcgacctggtatatgaagaccattcttccttatcagggttgggcgctgattaatcctatggatatggttggtcaggatttgtgggtttcctttatgcagcttctgccttatatgctgcaaaccggtatcctgatcctctttgcggtactgttctgttgggtgtccgccggattctggacggcgttaatgggcttcctgcaactacttattggtcgcgataaatacagtatatctgcgtcaacagttggcgatgaaccattaaacccggagcatcgcacggcgttgatcatgcctatctgtaacgaagacgtgaaccgtgtttttgctggcttgcgtgcaacgtgggaatcagtaaaagccaccgggaatgccaaacactttgatgtctacattctgagtgacagttacaacccggatatctgcgtcgcagagcaaaaagcctggatggagcttatcgctgaagtcggtggcgaaggtcagattttctatcgccgccgccgccgtcgcgtgaagcgtaaaagcggtaatatcgatgacttctgccgtcgctggggcagccagtacagctatatggtggtgctggatgctgactcggtaatgaccggtgattgtttgtgcggcctggtgcgcctgatggaagccaacccgaacgccgggatcattcagtcgtcgccgaaagcgtccggtatggatacgctgtatgcacgctgtcagcagttcgcgacccgcgtgtatgggccactgtttacagccggtttgcacttctggcaacttggcgagtcgcactactgggggcataacgcgattatccgcgtgaaaccgtttatcgagcactgtgcactggccccgctgccgggcgaaggttcctttgccggttcaatcctgtcacatgacttcgtggaagcggcgttnatgcgccgtgcaggttggggagtctggattgcttacgatctcccgggttcttatgaagaattaccgcctaacttgcttgatgagctaaaacgtgaccgccgctggtgccacggtaacctgatgaacttccgtctgttcctggtgaagggtatgcacccggttcaccgtgcggtattcctgacgggcgtgatgtcttatctctccgctccgctgtggtttatgttcctcgcgctctctactgcattgcaggtagtgcatgcgttgaccgaaccgcaatacttcctgcaaccacggcagttgttcccggtgtggccgcagtggcgtcctgagctggcgattgcactttttgcttcgaccatggtgctgttgttcctgccaaagctattgagcattttgcttatttggtgtaaaggaacgaaagaatatggcggcttctggcgcgttacattatcgttgctgctggaagtgctgttttccgtgctgctggctccggtacgcatgctgttccatacggtcttcgtcgtcagcgcgttccttggctgggaagtggtgtggaattcaccgcagcgtgatgatgactccacttcctggggtgaagcgttcaaacgccacggctcacagctgctgttagggttagtgtgggctgtcgggatggcgtggttggatctgcgtttcctgttctggctggcaccgattgtcttctcgttgatcctgtcaccgtttgtttcggtgatttccanccgtgccaccgttggtctgcgcaccaaacgctggaaactgttcctgatcccggaagagtattcaccgccgcaggtactggttgataccgatcggttccttgagatgaaccgtcaacgctcccttgatgatggttttatgcacgcagtgtttaacccgtcatttaacgctctggcaaccgcaatggcgaccgcgcgtcaccgcgccagtaaggtgctggaaatcgcccgtgaccgccatgttgaacaggcgctgaacgagacgccagagaagctgaatcgcgatcgtcgccttgtgctgctaagcgatccggtgacgatggcccgtctgcatttccgcgtctggaattcccctgagagatattcttcatgggtgagttattacgaagggataaagctcaatccactggcattgcgtaaaccggatgcggcttcgcaataaaaacgtagttgcctgatgcgctatgcttatcaggcctacatcgctcctgcaatgtgttgattttgcaagattttgtaggtcggataaggcgttcacgccacatctggcaaaaacaacgagccaataaaaataccggcgttatgccggtatttttttacggaagaggtatcaaatgcgtttaattgtggtgagcatcatggtgaccttgctgggtggctgtggcagcatcattagccgcactataccggggcaggggcatggcaaccaatattatcccggtgtgcaatgggatgtgcgtgactccgcctggcgttatgtcacaatccttgatctgccattctccctggtttttgatactttactgctgccgatcgacattcatcatggcccgtatgagtaattaacgttcatcccactcatcagctgctgcgcgtccttcctcggtatccagcggtggctcaagctgaaattccccctcgtcccattcatgtaatgtattctcttcctgccactcctggcggatctctatctcatcatagtcgccatcaaaaacactttgcgcggcttcaccgctaagcataggtaaacattcaccttcttccccttcgtcggcaaaaaactcaacttgccacatgatgtcgccgtcctgcaaaacgtatttttgggcattgaactgttgcacattcgcatcttcggcgtcgatgccggggttgtctgcaagaaattcttcgcgtgcagcgtcaatggcttcttcaagcgttgcgtacatggtcatcacgattctccctttgagttgatgaggtttcagggaaaaggatagctgattctccgcttttgcaagtatgaaaggcgaaaaatcagttcgatacctggggtattcgacgacgacgtagactgttccatgaatagactgcgttgaataacactacgccagcggtgacgagaaataccgctctgaaaccgtagttcgctgaaatcgctgctcccatcaatggtccggtaacgttgccaatatcacgaaacgattggttatagctgaagatacgtccggcgatttggttgctcgagttgtaaaccaacagtgtctgtacggcggggagtagtgcaccatcggcggcaccgagcaaaaaacgtaaaatcccaagttgcaatggcgtctgaacgtaagacattgggatcaacagcagtacagaaaagatcagcgccgtaatcaggatcttttcgggtccgattcgatcgccaagtttgccgagtcgtggtgcactcagcagagcagctacgcctggcaccgaggcgatcatgccactgataaaggcgacgttactgacgttacccgccagttcgcggacatacagcgtcagaatgggggcaattgagcccgtcgccacctggatgattaacgtggtgacaaacaggctgagtaccagtttcgggtttttaagtgatgtcaccacttcccgcatgtgcagcatctcttttttgctgaccggctggaatttttctctgatgcaaaacagggtgacgaaaaagcagagtatgagcacactggcggtaataaagaataccggacgtaagccgtagctatcggcgagcaggccgccagccattgggccgagcaacgcaccgctaacgccgcctgtggagagcgtacccagtgcccagccgcttttattacgcggtacttgtgtggcgataagagcattagcgttggggacaaatccgccaagtaacccaagaagcgcccgcaggatcaaaaactgccagatattttgtgccagccccatcaacaccatcacgatgcccatgccgagagcagagcgtaatagcatgagttttcggcctttacggtcggcgagtccaccccaaaacggtgaggcgatggccgaaaataaaaatgtaatgctgaagacaataccggaccacatattcagggcggagtggccggtaacgccaagctgctcaacgtagaggggtaagaagggcattaccagactgaaggcggcaccggtaagaaaacagcctagccaggcgacgatcaggtttcgtttccagtttataggggtgtcattttcacagggtgacatagcaatccgctgttggtgcgccaggcgcggtgaacataagaagaaaagataagcacactaattatgcgcccgacttccagggggcgcaatccagagagcttttatcgctaaatcagggggatttgctgtggtaatgccggatgccattctgaagcatccggcatgggagatttaatagcgtgaaggaacgccttccgggcgtgttttaaagcgacggtgtaaccacatatactgctctggtgccatcatgatgcatttttcgaccactttgttcatccacgcggcggtagtttcggcatcatccagcggcggagaacactctggcggcagcataatcaattgataccctttgccatctggcttacggcgtggaacgaagggcaccagacatgcgccggacatccgtgccagcatccaggttccggtcgtggtcgcagcctgctcaacggcaaataaagggacgaaaacgcttgagcgcgggccgtaatcatgatccggtgcgtaccagaccacttcgccttttttcagggctttaatcatgccttttaaatctttgcggtcgagcatcgatttatttgagcgcaaacggccccaggtttgtagccagtcaatcagtggattatcgttcgggcggtaaacgccaatccccggttcctgcataccaaactgccgcgcacccagctccagtgtcagaaaatggatgccaactaacaggatgccgcgtttttgcgcctgcacgtcacgaatgtgttccatgccgatcacttccgtccagcgagcgattcggcggtccggccagaaccacgccatgccagtttccatcagtcccatgccaacggattcgaaattcttcaccaccattttacggcgttcttgttcgctcatttccgggaagcacagttccaggttgcgatgcacaatttttgcgcgtcgtttcataaaacgtaacgccagttttcctaatccacaaccgaggcggtagataaccgggtagggcaattgcacgactaaccaaagtacgccaatacccaaccaggttaaccaataacgcggatgaagcagtgcggtggagaacttgggtagattcgtcatatcaatcctgtttttcaacctattcgggcaattgtatgtattgtcgcattttttcgcccgcaaccaaaatttgtggctgaagactgggcgaaattgccgcgcttgtaaataacaaanaatttttaatgcgcaaatgtagcgtaaaatgtgtggatgttaattatcgataattgctatatcatgccgcggatttttactttcccatctcccaggaaccgtacaccatgccagtgttacacaaccgcatttccaacgacgcgttaaaagccaaaatgttggctgagagcgaaccgcgaaccaccatttcgttttacaagtatttccacatcgccgatcctaaggcgacccgtgacgctttatatcagctgtttaccgcgctgaatgtttttgggcgagtgtatctggcgcatgagggcattaacgcgcaaatcagcgtacctgcgagcaatgttaaaacatttcgcgcgcagctctatgccttcgactcggctttagatggcttacgcctgaatatcgcgttggatgatgacgggaaatccttctgggtactgcgcatgaaggtccgcgatcgtatcgttgccgacggtattgacgatcctcactttgatgccagcaatgttggtgagtatctgcaagcggcggaagtgaacgccatgcttgacgatcccgatgcactgtttatcgacatgcgtaaccactatgagtatgaagtggggcactttgaaaacgcgctggaaattccggcagataccttccgtgagcagctgccaaaagcagtcgagatgatgcaggcacataaagataaaaaaatcgtcatgtactgcaccggcggcattcgttgtgaaaaggccagtgcctggatgaaacataacggattcaataaagtctggcatatcgagggtggaattattgaatacgcccgtaaggcgcgcgagcagggcttgccggtgcgttttattggcaaaaattttgtttttgacgagcggatgggcgaacgtatatctgatgagattatcgcgcattgccaccagtgcggtgcgccgtgcgacagccataccaactgtaaaaatgatggctgccacctgctgtttattcagtgtccagtatgtgcggaaaaatacaaaggttgttgtagtgaaatttgctgcgaagaaagcgcgttaccgccagaagaacagcgacgccgtcgggcaggacgtgaaaatggcaataagatctttaataagtctcgtggacgtctgaatacaacactgggcattcctgatccaacagaataaatatcattgccggatgcgtgccatccggcaacatttcactcttacttctgctgtacgccttccactgaaataatcagatccacttcctgagaagctggacctaaatctgtcttgatattgaagtccttgagcttaattttgccttcggcctcgaagcctgcacgtttaccaccccatgggtcgtcgccctgaccaattaatttcgcttccagcgtgacgggtttggttacaccattcagcgtcagatcgccggtaatatccagttcgtcaccgtctttcttcacgctggtggaggtgaatgttgcctgtggatattttgcggtattgaggaaatctgcactgcgaagatgtttatcacgttcggcgtgattagtatcgacgctggtggtgttaattgtcacattcactttatcggcagctggatttttttcatcaaaggtaaaagtaccgtcgaaatctttaaaggtgccatataaccagctatagccaagatgctggatgcggaagttaacaaaggcgtgctgaccttctttgtcaattttgtaatcggcggcaaccgctgaaccggcagagaacatcagggacgcgaaggttaaaccaagcaggctttttttcattttttatactccatagtcagatgacgactttcccagcatgcgcttcagagtgtcgtctttatcgatgaaatgatgcttcagggccataaatccgtgcataacggacagtactacgacgctccacgcgagccaaaaatgcagggcaccggcaaagtctgcctgtgcgccagcgtcggcaagggtcgcggggacgtcaaaccagccaaaaacgctgatcggtttaccatcggcagttgagatcagatagccgctgatgccgatggcgaacagcaataggtacaatgcgagatgcccagcttttgcggcaagatgagtcatgggcgaataactcggcagcggacccggcggtggagatatgacacgccacagaacgcgaataaccagccccatcattaacaaaataccgatgcttttatgtagttcgggtgctttgtgataccagccatcgtaataactgagcgtgaccatccacagacctaaagcaaacatgccgtagacaataattgcgcttagccaatggaaggccgcagatataacaccatagcgttcaggggtatttgtgaatgacataagtgcatccaaaacgaatttgtgagagaaagaaaatggcgtgtcggagaatgaattgcaacacaaaaataacaaattgaatgatatttattttnnttnnnnnaattttgaattaataatgaaagaatcttcataagtttagtgggttcagcatcagagatgtctggtgagtgctgtagaagcaggaataatctcattcaatttttcacgctaaatgaaagggagattaaatatttgtcagtttatgtcagtgcggaaaactaaaaataaaacacatagatcagatccataattgccaacaatccccagagaaaacgatatagcatcagatgctcgcgaatattattgatgagatagtgcaacagccgacgcattaaatactcctgtaaaaacggcctcattctggaggccgtaatgatgattattggaagcgggaaaggctgaatggcgtcaaatcaaaatcgctttttttgtcttgcgcaaaatcggcagctatttcccctaaaactgacgcaaatttaaaaccgtgcccactcaggccggtaatgagcagtgtattatcgtggccgggtagggtatcgataataaaatcttcgtcaggcgaattatcataggtgcaggcagcgccgtacaggcagcaaccgatacccggcaatacattgcgcaagaacgggaaggcttccgaaccatcgctgaccacttccgcaaacggaacacgttcatccgctgaatggataacctggcctccgttatgtttgccaatcttcaacgcgtcgttttctgccggaaaaccataatattgatcgccattgggcagttcaccggtaaacgccgggaatttattcttcacgctatagcggccatcggcctgataccaggcaaatactttacgtacgggctggacaggcagctccgggagcaggtcttttacccatgttcccgcgcagacaatcgcttttttcgcctgatactcaccgtcagccgtttcaatagttacgccatcatcgtcatgacgaattgcggtgaccgggcagttgaacagttgcgcacagcccgcttccttcgccagttggatccaggttttaatcgccagttcgctgcgcaaaaaaccggaatcagtctcaaataagccgatgtagttgtccgggacgcgtatttctggccagcgggccataatcccttgcgcatcgagcttttcaacgttgagttgccactgttcggcgctgtgggcgacgttggcgagaaatgcggagtcagccgggccaaggttaatgacaccagagcgtacaaaaatgggatcatcttcgttgtggcgggagaggtcatcccacagcgtttgtgcgcggaggaccagcgggacatacttttcgccttcaccataagcatgtcgaattaatcgcgtatcgccgtggtggctgccgtgttgatgtggtggcatatgggcgtcggtcataagcacgtttaaaccggcgcgggttgcataatacccggcggcagcgcctacggaaccgctgccaataatgatgagatcgtatttcatttttttctctctgctctcatggtttaagcagagtaattaactgaatgcagatatacaacccagaaatggtaaaggcaccggtgaggtgccttttgggtggatggtcatatcatgttaatgacgccgatactcgtttaccgggaaatcaccggattcaattttggcgattcctgcttctaatatcgaaataaattgtctggcaacatcagtggttaaccagagcgtctgaccaacttcagtcccttcctgctcggacttatttggggtctggtagtgcaaacgcaacatcagcgcatcatagctatcaacggtgctgatgtcccaccctacgagcggatgagtctgaatgacttcattatttttttccatcatggccccctaattcgtgttactagacaacgttattcgaggttcaatgcgtttttatctgaagcaacttcagtataccaataaataagggtaatcaccnaatttttaaaggggggaacagataaatttctgcttttaagatttatatgaacaataaaacagcatgtcattcatatttttttagcatattgtgcaattattttgaggaagtgtagaaattttgtactcataattcgcaagtaaaataaaaaagccggggcgacccggcaaaaacaaaaatcactgcatattattcgctgacaaaccagtcatcggcgctttcccacgtttcttggagaatttcgctaatgcgctgtttatcttcttttgtcgcgccaataaccgataaattattcgctgcggcataacgtactgatacgtggccttcattatcaggaaacgcatactgaatacggcgggaaagttcgccagccagggcgtcaatagccccagctggcaatggagaagttttcgctatggtgacttcaattcgcataatagccccctgttgaatatactggttatttatacaggcaaaataacctaatgacaacaggaagctacgatttttattgtttaacagaccagcgtaccgtttccccggcgaggaatggcaccagcgtgtcatcagtcagtgcgatgctttcagcaacctgatgctcttcacgtaccagttcgatgaatgtgtcgttgaccggtaacccatagaactgcgggccgtttacagaacagaatgcttcaaagtgctgcagagcattcatctcttcaaagacggtagcgtaacttcccagcgcggttggggcgttgaagcagcccgcgcagccgcagctgctctctttgcgatgacgtgcatgtggcgcagaatccgtaccgaggaatactcgattaaaaccgctggcgactagttcacgcaatgcctgttggtgaatattgcgtttgaggatgggtagacaatacaggtgcggacgcacgccaccaaccagcatatggttgcggttaaacatcagatgttgcggagtgatggtagcagccagccgttcatttccgtcacggacatagtcggctgcgtctttggtggtgatgtgctcaaaaacgactttcagcgcggtcaggcgctggcgcagaggttccatcacgctttctanannnngcgcttcacgatcaaaaatgtcgatatctgcatgtgtcacttcaccatgcaccagtagcggcataccgattttttccatgcgctctaataccggcatgattgcgtcaactgacgtcacgccgtggctggagttagtggttgcgtttgccgggtaaagttttgcagcggtgaacacgccttcgttaaatccgcgctccagctcattaggatccagcgaatctgttaaataacaggtcatcaatggggtgaaatcgtgcccggcaggtacggcgtgaagaatacgttggcgatacgccacggcagcctcaacggtggtcacgggcggagccagattgggcattacgatagcccgtccataaatttcgctggtatacggcacgacagtttttaacatgtcgccatcgcggaggtgaaggtgccagtcgtctgggcggcggatctttaatacctgggatggtgcagtcattaatctctatgctccggctgaagggatgtttttgccggacacaaaggataagcggaaacgttttcctttgcacgaaaaaaaaagggngcgaatgcgccntcgtgattaatcagtaaatggaatgacaatttcgcctggcttcacttcaatgcctttcgccagttttttcgccattgcttcgccctggctgccatcttcgcgcaggacgtaagcaggttgctggttaaagtaattgcgtaatgcctggttcagatagggaagcaacgtttgcatcaccgtttgcattttttccggttgtaccgtcgcatcgaccacctccatctctttcaggaagatcgcgcctttttctttatcaaacacgggcagcgctttcagcttcagtttcatggtcgctttctggctaccgaacagggagttcatgtccagattggcgtctccggttagggcaaccttattcggctcttcgcgaccaatttggctggtcaggtttgtcagaacaatatgggcgtcagccacaccgggtaaaccaatatcttttgagaaattattatgtttcgcaagcgactggttaatttcttgttcggtgatggtgtattgggtgagttgattacagccaacgagcaggccactgacgatcaatgcagcggcaaataaaaacttgttcatggtagtcctcgacatgaaatctgcgtcaatatcctgacacaacgcagcatgtgtcaccagcgataaactcgccagcagaaaaaactgaaaacggcggcaacccgcgaatacaggctgccgcggcgagtcaggattaaatcgccattgatgataacaaattgatttgtgtctgtttcgccatattatcgcggtaatcagcaacgcggcttggccagttaattccggctaccagcgtcagattacgcagtagcgggaatagctgaatatcatcttccgaaagttcgccattcacggcgttcggtttgacgatcagtttgtccagcgcacgtaaatcatcgctgatattcttaatcagaccgtcagagtgggccagcaggtcggcaaaattacccgcgctggcctctttcttgtcgacgaaatatttgcgcgcggcgggagtagaaaactcatcaaatgccgatttggcaaaacgcggcaacagcagtttattggcgtagccattgaccttgcgcagccactcttcaatggcaggggaacgtttgccggtcagtaacggtttgccgtcgagtttatcgacatagtgaacgatatccatgctttctggcatatagcggctgtcatctttttgcagaatgggaacctgtttttgaccgaccatccgggtgggtgtttctgcgtcgtcgttgagcagaacatgtaattcgacggggatatttttcaggccgaaaatcatgcgggctttgaggcagtaagggcagtgatcgtaaatgtatagcttcacgtgactcctccatttggctgtcagttcactttcagtatggaggagtcaggggggagtatcaaatcaggcgtcgcgttcaagcaaacgacgcgcggcgcgtttctggctaaactgccaacccagcgcaaggaaagtgaagatgccaataatgcccagcatcatccacggaagctctggctggtgcaccgatttgcccaggtcaaacagccagccgccaccgatataaccaatagcgccgccaatcgccagacccagacggctaaaccccatatagctgccgcgagntcttgcgtccgccagcgaagcacttaaggtttcacgcgcaggctcggcaatgatcgacccgatataaaacagacaaatcagggtgaaaagttgttgcaggccgctgaccatgcccaccggcatcatgcttaatgacattatcaacagcccagccatcaaccggtgttccagacgaaaatgcttttcactccagcgggcgatagggtagagcaacgttaacgacagacacgcttcaatggcatacatccatttaacggcagagggcgcgccagccacatcgttgaccataattggcagcatcagcatcacttgtacagccagcatgtagtaacccgccagcgtcaggacataggtgacaaaacgcttgtcgcgcatcacgcgggtcatgccttcgcgaacgggcgtgcgtacggtggagagtttccatgccggtaacaaccacgcattgaacgctgcacacagcacaaacaaaacggcccctgtggcgcagaccaggcgaaagtcgtattgcaacagccagntccccaacaatgcgccaatgaccgcaccggcactgtcctgcatcatcaacagcgagaaaaaacgaccacgctgttgtggacggattagtttcaccaccagcgccgaacgcggcggatcaaacaacgtgccaccgagtcccgagagcaggcatgaaaaccacaatagccacggttcgtgggcgatacccattgtggcgaatccggcggcacgcatcagcataccggtaacaatcatcggtttggcaccaaagcggtcggcaattgcgccgccgaaaatacccagaccttgctgaataaactggcgtaggccgagggcaataccgaccatgacggcggcccagcccatttgatcaacgaagcggatagagatcagcgggaagacaacaaagaaccccagcacgaccagcatattatcgatgagcaggaaatatttacccaggttcctcgcctgcgacacgcgggacatttcccctcccgggaaataaaagatgagcactttctattctgcattgccgctaagacttttcccatcacttcggggacaatatttttttnnnnaaacgtcgctttgatagagagtttttatcaaatatgtgaataatgcagaaaatggcattttggacttttcacagggtctggttgcgcaggtatagtaatacttacagcgtattaaagacgttacgggaaggagtaggtatagaatgtttggctatcgcagtaacgtgccaaaagtgcgcttaaccacagaccgactggtcgtgcgtctggtgcatgatcgtgatgcctggcgtctggcggattattacgcagagaatcgccatttcctcaagccctgggagccagtgcgcgacgaaagccactgttatccatcaggctggcaggccaggctggggatgattaacgaatttcataaacaaggttcagctttctactttggcttattcgacccggacgaaaaagagattattggcgttgccaatttttccaatgttgttcgcggctcttttcatgcctgctatctcggttattcgattgggcaaaaatggcagggcaaaggactcatgtttgaagccctgaccgcagccattcgttatatgcagcgcacccaacatattcatcgcattatggctaattatatgccgcacaataaacgcagcggtgatttactggcgcgactgggttttgaaaaagaaggctatgcgaaagactatctgttgattgatggacaatggcgcgatcacgtactgacggcattaactaccccagactggacgcccggccgctaaggagaatctcatgaaatatcaacttactgccctggaagctcgtgtgattggttgcttgctggaaaagcaggtgaccacgccggagcaatacccgctctcagtcaatggtgtagtcacggcctgtaatcagaaaacgaaccgtgaaccggtcatgaatctgagtgaatctgaagtgcaggaacagctggataatctggtcaaacgtcattatctacgcacagtgagcggttttggtaatcgggtcaccaaatatgagcaacgtttttgtaattcagaatttggcgatctgaaactgagcgccgcagaagtggcgttaatcaccacgttgttattgcgtggtgcccagacgccgggtgaactgcgcagccgcgccgcgcgaatgtatgaattcagcgatatggcggaagtggagttgacgctggaacaactggcgaatcgcgaagatggtccttttgtggtgcgtctggcccgcgaaccgggtaaacgcgaaagccgctacatgcatcttttcagtggtgaggtagaggatcagccggcggtaacggatatgtcgaacgcggttgacggtgatttacaggcccgcgtcgaagccctggaaatcgaagtggcagaactgaaacagcgtcttgattcgttgctggcccacctgggagattaaagtgaaaaaattacgtatcggcgtagtgggattaggcggcattgcgcaaaaagcgtggttaccggtgctggcggcagcgtctgactggacgttacaaggagcctggtcgcctacgcgcgcgaaagccctgccaatttgtgaaagctggcgcattccttatgccgattcgttatccagccttgccgccagttgcgatgcggtttttgtacattccagcaccgccagtcactttgacgtggtcagtacgttactcaatgcgggggtacatgtctgtgtcgataaaccgctggcagaaaatctgcgcgatgctgaacggctggtggaactggcngcgcggaaaaaactgacgttgatggtcggttttaaccgtcgtttcgcaccactctactgtgagttaaaaacgcaactcgccaccgcagcctcgctaagaatggataaacatcgtagcaatagcgtcgggccacacgatctttatttcacgttgctggatgattatctgcatgtggtggataccgcgctgtggttgtcgggcggcaaagcctctctggatggcggtacgctactgactaacgacgctggcgaaatgctgtttgccgagcaccatttttcggccggtcctttgcagatcaccacttgtatgcatcgccgtgccggaagtcagcgtgaaaccgtgcaggccgtgactgacggtgcgctcatcgacattacggaaatgcgcgaatggcgtgaggagcgtgggcagggtgtagtgaataaaccgattcctggttggcagagcacgcttgagcaacgtggatttgtcggctgtgcgcggcacttcattgaatgcgtgcaaaatcagacagttccgcaaaccgccggcgaacaggcagtgctggcgcaacgtatcgttgacaagatctggcgcgatgcgatgagtgaataaaccctgtaacatctnnnnnnngcaattcaccataatccaggtagactattcgcctctttcagcgcctgccttgcaggcgttttgcccgtgggtctggattagaacaccgatgaatttattaaaatcgctggccgccgtcagctcgatgaccatgttttcgcgtgtgcttggcttcgcacgagacgcaattgtcgccagaatctttggcgcagggatggcaaccgacgcctttttcgtcgcttttaaacttcctaacttgttacgccgtatctttgccgaaggggcattttcccaggcatttgtaccgattctggcggaatataaaagtaagcagggtgaagacgccacgcgggtctttgtctcttatgtttctggcctgctgacacttgcgctggcggttgtgacggtcgctggcatgctcgccgcaccgtgggtgatcatggtgaccgcgccaggcttcgctgacacagctgacaaatttgccctgaccagccagctactaaagattacctttccctatatcttgctgatctccctggcgtcgctggtgggancgattctgaatacgtggaaccgcttctcgattccggcgtttgctccaacactgcttaacatcagcatgattggtttcgcgctgtttgccgcaccgtactttaacccaccggtgctggcgctggcgtgggctgtgacggtcggcggcgtcctgcagctggtgtatcagctaccgcatctgaagaagatcggcatgctggttttgccacgcattaacttccacgatgccggagcaatgcgtgtggtgaaacagatgggaccggcaatccttggcgtctctgtgagccagatctccttaatcatcaacaccatttttgcctcgtttcttgcttccggttcggtgtcatggatgtattacgccgaccgcttaatggagtttccgtccggtgtgctgggcgtggcgcttggcaccattttgctaccgtcgctgtcgaaaagttttgccagtggcaatcatgatgaatacaaccgtttgatggactggggactgcgtctttgtttcctgttggcgctgccgagtgcggttgcgttgggcattctttccggtccgttaaccgtttcgctgttccagtacggtaaatttaccgcctttgatgcgctgatgacccagcgggcgttaattgcctactcggtgggtttgattggcctgattgtagtgaaagtgttggctcctggcttttattcccgccaggacattaaaacgccagtgaaaattgccatcgttacgctgattttaacgcaattgatgaacctggcgtttatcggtccgttgaaacatgccgggctgtcactttctattggtctggcggcgtgtctgaatgcttcgctgctttactggcagttgcgtaagcagaaaatctttaccccgcaacctggctggatggcgtttctgttgcgtctggtggtggcagtactggtgatgtctggcgtgcttttaggtatgttacatatcatgccggagtggtcattgggtaccatgccctggcgtttgctgcgtttaatggcggtcgtgctggcggggattgccgcgtacttcgctgcactggcggtactgggcttcaaagttaaagaatttgcccgccggacggtgtaacaatgcattccggcctgcagtgcaggccggagataatcttcagatcgaaatctttttactgccgcgatgggttgttgaggtctgaccgttcgccccatatagcgtcggttcctgatgcggtttcaacatttccagcgcctgttgattgcgctcaatctgtccttccagtaaccagccgttatgttgattcatttggcgtagttgctgcgttttcacagcaatttcctgccagcgttgactaatatcaacgctatttgctgtattgggttctttcctgcgtaactgttcgaggtaatccaacgttgccagcagtgagcttttttgttctgtaatccattgcaactggctgccgttgatctgccccatagagagatgttgctgctcttgatccattaccgttttgagatcgttaagcacagcggacatctggtcgaggatctctgcaagacgcgtcatacgattaattactctgcaagtcttgctgcgcttcgttgatcagcgcatcggcaattttgccggtgtccatttttagttcaccgttacgaatcgccagttttaacgcttcgacacgttcaagattgatatcactgctgccgggttgcatcagttttgcttgcgcgtcgcttaacgtcacactggtgctggtggaggctgttgtttttgccgctcgggtgttcgttaccggcgcgtcagtggtttcgcgcggttgaacggtgcttacgggcttcagaggcgaagtgcgatcaatactcatggtttattcctcattgagggcgcttttatcatgtgttgcttatttatcggcaagggacgggtaatctttaacagcttacaggtttataagaatattcccatctgcatcaacaacgccgctgactacctgtccagataccatgcgcacccgcgcattctgtgcgacggctgcattgttcagcgcctgaccttctgcgttggcgctaaacccatcaccgctggcgatcacgttgacgcgttgtcccgcttttacccgccatgcctggcgaaactgggttaactggataggttgatcgggtgatagatcgcgcaggctaacggcatcaacaagttgattgatatccagcaccgtacgcggtggcaaggtatccagccgtccgcgtttcagtttgacattgccagctcccagctttcctcctcgcacaatgggcatcgcggcaaccacataatttcctgtggcctgcacattaacctgtaaatatcgtttgtcgttaccgcagcgtgccaacacattcacattgccccacaagcgggaattattgctcatcgaaagcaatggctgctcgcacggcggtagtagattgggcgctgtacgaatagaaacacgaacctcatcacttatccctgcgagctgggagctaaaaaaggtttgcaattgcgatgtgagattgctcgccgcacttaacggactgaacagtatcgcgatgatcgccacgctacgttttattgccagcattttcgcccccagccatttctacaacgtgaattgtacctgtccgcaatgaccatcaacggcataaatagcgacccattttgcgtttattccgccgataacgcgcgcgtaaaggcatttaagctgatggcagaattttgatacctgcggaggagatatgctcgataagctcgacgccgccttacgttttcaacaagaggcgctcaatctgcgcgcccagcgtcaggaagtgctggcagcaaacatcgccaatgccgatacccctggttatcaggcgcgcgatatcgattttgccagtgaacttaaaaaagtcatgcaacgtggacggaatgcaaccagtgtggttgctctgacgatgacctcaacgcaacacattccggcgcaggcgctgacgcctcctaccgcagaactgcaataccgtattccggaccagccttcgcttgacggtaataccgtcgatatggatcgcgaacgcacccagtttgccgataacagcctgcaataccagatgagccttagcgcgttgagcgggcaaatcaaaggcatgatgaacgttttacagagcggaaattaacggatggcactgctgaatatttttgatatcgccgggtcggcgttaactgcccagtcccagcgcctgaacgtggcggccagtaatctggcgaatgctgatagcgtgaccggtcctgatggacagccatatcgggcaaaacaggtggtattccaggttaacgctgcaccaggtgctgcgacaggcggcgtaaaggttgccgatgttatagaaagtcaggccccggacaaactggtttatgaaccgggtaatccgctggcggatgcaaagggctacgtaaaaatgccgaacgttgatgttgtcggagagatggttaacaccatgtcggcgtcacgcagctatcaggccaatgttgaagtgctcaacacggtgaaaagcatgatgctgaaaacccttacgctcggtcaataaaggagaaagctatgtccattgcggtaaccaccaccgatccgacaaataccggcgtcagtaccaccagcagtagttcgctcacgggcagcaacgccgcagatttacaaagcagttttctgactttgttggtggcgcagctgaaaaaccaggacccgaccaatccaatggaaaacaacgagctgacgtcgcaattggcacaaatcagcacggtcagcgggattgaaaaactcaataccacgctnggatctatttccggacagattgataacagccagtcgttacaggccagtaacctgatcggtcacggcgtgatgatccccggcaccactgttcttgcgggaaccggcagtgaagaaggggctgtgaccacgaccacgccgtttggtgttgagctgcaacaggcggcagacaaagttacggccaccatcaccgataaaaatggcgcggttgtgcgcaccattgatattggtgaactgaccgccggagttcacagtttcacctgggacggtacgttgactgacggcagcactgcgccgaacggttcttacaacgtagcgattagcgccagtaacggtggtacacaactggttgcccagccgctgcagtttgctctggtgcagggtgtgatccgcggcaacaacggtnatacgctggatctcggcacttacggcaccaccaccctcgacgaagtacggcagataatttaagccttcacatttcaggagtcagtcatggccttttctcaagcggttagcggattaaacgctgccgccaccaacctcgatgttattggcaacaatatcgccaactccgccacctacggctttaaatcaggcacggcctcttttgccgatatgtttgccggttcgaaagtgggactgggggtaaaagttgccggtatcactcaggactttaccgatggcacgaccaccaacaccgggcgtggtctggacgttgctatcagccagaacggttttttccgtctggtagatagcaacggttcggtgttctacagccgtaacggacaatttaagctggatgaaaatcgtaacctggtgaatatgcaaggtttacagctgacgggttacccggcaaccggtacgccgccgactattcagcaaggggcgaatccgactaacatttcgatcccgaataccctgatggcagcgaaaactaccaccacggcgtcgatgcagatcaacctgaattccagcgatccgcttccctctgttaacgcatttgatgccagcaatgcggatagctataacaaaaaaggttcggtgactgttttcgacagtcagggtaatgctcatgacatgagcgtctactttgtgaagaccggggataataactggcaggtctacacccaggatagcagtgatccaacaggtacagccgagcctgcaatgaagctggtgtttaatgccaatggcgttctgacctcaaatccaacagagaatattaccaccggcgcaattaacggcgcagaacccgccacgtttagcctgagcttcctcaactccatgcagcaaaataccggcgctaacaacattgtggcaaccacccagaatggctacaaaccgggcgatctggtgagttatcaaatcaatgatgacggtacggttgtcggcaactattccaacgaacaaacccaactgctggggcagattgtactggcgaactttgccaacaacgaaggtctggcatccgaaggcgacaacgtctggtctgcgacgcaatcttctggcgtggcgctgttggggacagccgggacgggcaactttggcaccctgaccaacggtgcgttggaagcgtccaacgtcgatctcagtaaagaactggtcaatatgatcgttgcccagcgtaactatcagtctaacgcccagaccatcaaaacccaggaccagatcctcaacacgctggttaacttacgctaatcgctgacgggatagctcaatggatcacgcaatttataccgcgatgggagcagccagccagacgctgaatcaacaggcggtaaccgccagtaatctggccaatgcctctacgcccggttttcgcgcgcagttaaacgccttgcgcgcagtgccggtggaagggctttcactgcccacgcgcacgctggtaacggcgtcaacaccgggtgcagacataacgcccggcaagatggattacacctcgcgcccgctggacgttgcgttgcagcaggatggctggttggccgtgcagaccgctgacggcagcgaagggtatacgcgtaatggcagcattcaggttgatcccaccgggcaactgacaattcaggggcatccggtgataggcgaggcggggccaattgctgtgccggaaggggcggaaatcacgatagctgccgatggaacaatctcggcgctgaatccgggcgatccggcaaatacggttgcgccagtggggcgtctgaaactggtgaaagccacgggcagcgaagtgcagcgcggtgacgacggcatttttcgtttaagcgcagaaacccaggccacgcgtggaccggtactgcaggcagatccaaccttgcgtgtgatgtcgggggttctggaaggcagtaacgtcaatgccgttgcggcaatgagcgacatgattgccagcgcgcggcgttttgaaatgcagatgaaggtgatcagcagcgtcgatgataacgcaggccgtgccaaccaactgctgtcgatgagttaattgaacgattgatgacattgcaataaaagcgagcggactgttccctcgcccctttggggagagggttagggtgaggggaaattcgcaccgccgcgtgcttctgctctgcttgtcagcaatccactacaggacattttatgatcagttcattatggatcgccaaaacgggccttgacgcccagcaaaccaatatggacgtcattgccaacaacctggcaaacgtcagtactaacggttttaagcgtcagcgcgcggtgtttgaagatctgctttatcaaaccattcgccagccgggggcacagtcttccgaacaaaccaccttaccctccggattacaaatcggcacgggggtacgcccggtcgccactgaacgcttacacagccagggcaacctgtcgcagaccaacaacagcaaagatgtcgcgattaaagggcagggctttttccaggtgatgttgccagatggctcatcagcctatacccgtgacggntctttccaggtggatcagaacgggcagctggtgacggctggtggttttcaggtgcagccagcgatcaccattccggcgaatgcgttaagtatcaccatcggtcgtgatggcgtggtcagcgtaacccaacaaggccaggcagctccggttcaggttgggcagctcaatctcaccacctttatgaatgacaccgggctggagagcattggcgaaaacctctacaccgaaacgcaatcctccggtgcaccgaacgaaagcacgccgggcctgaacggcgcgggactgctgtatcaagggtatgttgaaacgtctaacgtcaacgtggcggaagaactggtcaatatgattcaggtgcaacgcgcttacgaaatcaacagtaaagcggtgtccaccaccgatcagatgctgcaaaaactgacgcaactctaaggcataaccggtggcaggttcaccggtttattgatttttgaagatgatagccatgcaaaaaaacgctgcgcatacttatgccatttccagcttgttggtgctttcactaaccggctgcgcctggataccctccacgccgctggtgcagggggcgaccagtgcacaaccggttcccggtccgacgcccgtcgccaacggttctattttccagtctgctcagccgattaactatggctatcaaccgctgtttgaagatcgtcgaccacgcaatattggcgatacgctgaccatcgtgttgcaggagaacgttagcgccagcaaaagctcctctgcgaatgccagccgtgacggtaaaactaattttggctttgatactgtgccgcgctatttgcaggggctgtttggtaacgctcgtgccgatgtcgaagcctccggtggtaacacgttcaacggaaaaggcggggccaatgccagtaatacctttagcggcacgttgacggtgacggtcgaccaggtactggtcaacggcaacctgcatgtggtgggtgaaaaacagattgccattaatcagggtaccgaatttattcgcttctctggcgtggttaatccacgcactatcagcggcagcaataccgtaccgtctactcaggtggcggatgcgcgcattgaatacgtaggcaatggctacattaacgaagcgcaaaatatgggctggttgcagcgtttcttccttaacctgtcgccaatgtaagtgaggctgtggtgattaaatttctctctgcattaattcttctactggttacgacggcggctcaggctgagcgtattcgcgatctcaccagtgttcagggggtaaggcaaaactcactgattggctatggtctggtggtggggctggatggcaccggtgaccagacaacccagacgccgtttaccacacaaacgcttaataacatgctctcacagctgggaattaccgttccgacgggcaccaatatgcagctaaaaaacgttgctgcggtaatggtgacggcgtcacttccaccgtttggacgtcaggggcaaaccattgacgtggtggtttcttccatgggaaatgccaaaagcctgcgtggcggcacattgttgatgactccgcttaagggcgttgacagtcaggtgtatgcgctggcgcagggcaatattctggttggcggcgcaggagcctccgctggcggtagcagtgttcaggtgaaccaactgaacggtggacggatcaccaatggtgcagttattgaacgtgaattacccagccagtttggcgtcgggaatacccttaatttgcaacttaacgacgaagatttcagcatggcgcagcaaatcgctgacaccatcaaccgcgtgcgtggatatggcagcgccaccgcgttggatgcgcggactattcaggtgcgcgtaccgagtggcaacagttcccaggtccgtttccttgccgatatccagaatatgcaggttaatgtcaccccgcaggacgctaaagtagtgattaactcgcgcaccggttcggtggtgatgaatcgcgaagtgactctcgacagctgcgcgatagcgcagggaaatctctcagtaacagtcaatcgtcaggccaatgtcagccaaccagatacaccgtttggtggcggacagaccgtggtaacgccacaaacgcagatcgacttacgccagagcggcggttcgctgcaaagcgtacgttccagcgccagcctcaataacgtggtgcgcgcgctcaatgcgctgggcgctacgccgatggatctgatgtctattttgcaatcaatgcaaagtgcgggatgtctgcgggcaaaactggaaatcatctgatgatcagcgacagcaaactactggcaagtgcggcctgggatgcgcaatcactcaacgaactaaaggcgaaagcgagcgaagatccggcggcaaatatccgtccggtggcccgtcaggtggaagggatgttcgtgcagatgatgttgaaaagcatgcgcgacgcgttaccaaaagatggcctgttcagcagcgagcacactcgcctgtataccagtatgtatgaccagcagattgcccaacagatgacgacgggcaaaggtctggggcttgcagagatgatggttaagcagatgacgccagaacaaccattgccagaggagtccacgccagcagcaccgatgaaattcccgctcgaaaccgtggtgcgttatcaaaatcaggcgctttcgcagctggtgcaaaaggccgtgccacgtaactacgatgattcgctgccaggtgacagtaaagcattcctcgcgcaactctcgctgcccgcccaactggcaagccagcaaagcggtgtgccacatcatttgatcctcgctcaggcggcgctggaatctggctgggggcaacggcaaatccgccgcgaaaacggcgagccgagctataacctgtttggtgtcaaagcctctggcaactggaaagggccagtcactgaaatcaccacgactgaatatgaaaatggcgaagcgaagaaagtaaaagcgaagtttcgggtctacagctcgtatctggaagcattgtcggattacgttgggctgttaacacgtaacccgcgctacgccgccgtgacgaccgccgcgagtgcggagcagggggcgcaggccctacaggacgcgggctatgccaccgatcctcactatgcccgtaaactcaccaacatgattcagcagatgaaatcgataagcgacaaggtgagcaaaacctacagcatgaacattgataatctgttctgaataactcaagtccggcgggtcgctgccgataatactctgtaattgaaggcttataaggaacctccatgtccagcttgatcaataacgccatgagcggactgaacgcggcccaggcggcgttaaatacggcaagtaataatatctccagctataacgttgccggatatacccgccaaaccactattatggcgcaggccaatagcacgttgggcgctggcggctgggttggtaatggtgtctacgtttctggtgtgcagcgtgagtatgatgcgtttattaccaaccagttacgtgcggcgcagacgcaaagtagcggcctgactgcccgctatgagcagatgtcgaaaatcgacaatatgctctccaccagtacctcttcgctggcaacacagatgcaggatttcttcaccagcctgcaaacgctggtgagtaacgcggaagacccggcagcgcgccaggcgctgattgggaaatcagaagggttggtgaatcagtttaaaaccaccgatcagtatcttcgcgaccaggacaaacaggtcaatatcgcgataggtgccagcgttgatcagatcaacaattacgctaaacaaatcgccagcctgaacgatcaaatctcccgcctgacaggcgtgggggcaggggcgtcacctaacaatctgctggatcaacgcgatcaactggtgagcgaattaaaccagattgttggtgtagaagtcagcgttcaggatggcggcacttataacatcacgatggccaatggttactcactggttcagggaagtacggcgcggcaactggcggcagttccttcctgcgccgacccttctcgtacgactgtcgcttatgttgatgggacggcaggcaatattgagatcccggagaaattactgaataccgggtcgctgggcggcattctgacattccgttctcaggatctggaccagacgcgtaatacgcttggacaactggcgntggcatttgctgaggctttcaacagccaacacaaagccggatttgatgccaacggcgatgagggtgaagatttctttgctatcggtaagcccgcggttctgcaaaacactaaaaacaacggtaacgttgcgatcggtgccacggtaactgatgcntccgcggtactggcgacagattacaaaatctcgttcgataataatcagtggcaggtcacccgccttgccagcaataccacttttacggtgacgccagatgccaacggtaaagtggcatttgatggtctggagttgacgtttacaggaacgcctgccgttaacgacagcttcacgctgaaaccagtaagtgacgccatcgtcaacatggatgtattaatcaccgacgaagcgaaaatagcgatggcgagcgaagaagatgcgggtgatagcgacaaccgcaacggtcaggccctgctggatctgcaaagcaacagtaaaacggtgggcggagcgaaatcctttaacgacgcttatgcctcgttagtgagtgatatcggtaataaaaccgcgacgttgaaaaccagtagcaccacgcaaggtaatgtggtgacgcagctttccaatcagcagcagtcgatttccggtgtcaatctcgatgaggagtacggaaatctgcaacgttttcagcagtattacctggcgaatgcgcaggttctgcagacggcaaacgcgatttttgatgcgctgattaacattcgctaaggggagataaaatgcgtttcagtacccagatgatgtaccagcaaaacatgcgcggcatcaccaattctcaggcagaatggatgaagtacggcgagcagatgtcgacgggtaagcgagtcgttaacccttcagacgatcccattgctgcatcacaagctgttgttctctcccaggcacaggcgcaaaacagccagtacacgctggcacgtactttcgccactcaaaaagtgtcactggaagagagtgtacttagccaggtcaccaccgctatccagaatgctcaggaaaaaattgtctacgccagcaatggcaccttgagtgacaatgaccgggcctcgctggctacggatattcaggggcttcgtgaccagttgctgaatctggcgaacaccactgacggtaacgggcgctacatttttgccggttataaaacagagactgcgccgtttagtgaggttaacggtgattatgtcggcggaacagaaagtattaagcaacaggtcgatgcttcgcgttcgatggtgataggacatacgggcgacaaaattttcgacagtattaccagtaacgcggtagcggaaccagacggtagcgcttctgaaaccaatctttttgccatgctggatagcgccatcgcagccctgaaaacgccggtcgcggatagcgaagcggataaagaaaccgccgctgcggcgttagataaaaccaaccgcggactgaaaaactcgctgaacaatgtcctgaccgttcgcgcggaattaggcacgcagctgaacgaactggagtcgctggattcattaggtagcgatcgcgcattagggcaaacgcagcagatgagcgatctggttgatgtggactggaatgcaactatttcatcttacatcatgcagcaaacggcattgcaggcatcgtataaagcatttaccgatatgcagggattgtcgctcttccagctcaacaaataagctcgctttaaaacatatcatgaaactgggtatgttttgtctgcccgctctgggatcgccggggcgggcatttttttgcctattttgcattgttggttagcaaggatgccattcgatgaattttaatatgttgattcaaagatgaaataaaaaagccctggcagttaccagggcttgattacttgagctaattattactcaacaggttgcggacgcgcaggagcggcagaggcatgatgcgttgccgtatgaccacctgcggcacctttaccttcgaaggcaaaagtagggcgctgccagtcactgtgacgcggtgcctccggaacatattccggtgccggagcgcgcgtcattggcgcggtagcgtggttatgctcaacggtgatctctggtttaaccgcggttaccgtttcaacttctgctgcgacttcagcgacgactggcgcggcaggttgagcaacaacttcaggttcagcaaccacaacctcagcagtttcggcaacttcttcaatatctgccgtctcttcctgcggttcaaccaccggttctgcgtgttctgcaacttcctgggctacggcaacatcagactcggtaatcacctgcggctgttcagttaccgcggcggcaatcacttcaggatgcgtcgtttcaaccacttccggttgcggttcggcaaccggtacgggggcttctacgacttcagccatttcttcaacaactggcgcgctaacaaccggttcgacagcggcggcgacagggacctcagtcaccatcggctgcacttgcacttcttcctgttcgcgctgctcttcaacctgtacatcttgtggacgtacaatcggatagcggatccagactttgccagaggccagttccggagacgcgcacgctacggtcaacggcattggcgattgggttggataacgctcgtcacgatagcgacgacgacgctgaccactcacgcgcaggtgacgaggcgagcggcgagaacgacgcggcatgccaccgttgtcacggttatcagcattgttctcttcttgctgttctggtgcagtttgcgctacgactggcagcgggactttcaccagttctgtgcgtggagctggcgcttcctgaacaattggttcggcagcgacagtttcttcagctaccggtgcgactaccgtttcttcggctacgctttgctcgtaacgcactttctgattgagctgacgctgtttacgacgcggctgaaccggacgtacacgttcttcctgttcggtttcctgaacagattgctcttcaacattcagcgccttcgcttcttgttgcgcctgacgtttatcatcgttacggcggcggctacgttcacgacgcggcgcttgctgctcgtcggcggtacgcgctttttccgttacctcagcctgctgacggccctcacgcgtctcggcagtctgctgctgtgcttggcgacgattacgacggttttcttcgcgattatcgctgccttcagtacgttcactacgggtgtcgcggcgctcattacggtcacggcggttgttctgacgaggcttgcgacgatcctgttgacgttccggtttcgcttctgctttcggtgctggttgctcggtcggtttggtttcttcaccaccgctgaacagcgctttcagtgcgccgaagaagcggctcaacagcccaggttgtgcaggagttgctggtgttgccggtgcagctttcggtgctggggctacaacaggcgcggcaggttcagctggcgttggcgctggcggcacatccggcatggcaaaggttgccagcgcaggttgttccggacgcttacgttcagcgaactcttcttcagacggcagcgccatcgcttcttcatgcagcttcggcagcatgtagcttaaggttggggtttcttcccctttacgcacgcgcagcacgtggtagtgcggggtttccatctgatcgtttggcacaattacacagcgcacaccgtcctgacgagtttcaatggcatttaccgcagaacgtttttcattcagcaggtaagaagcgattggcacaggaacaatggcgtgaacttcctgggtgttctctttcagcgcttcttcttcgatcagacgcagaatagagagcgacagcgattcgttgtcacgcacggtgccagtaccagaacaacgcggacaaacgtgatgactggattcacccagtgatgggctcaggcgctggcgggacatttccagcaggccaaagcgagaaatatggctgatttgaatacgcgcacggtcctgacgcaccgcttcacgcagacggttttctaccgcacgctggtggcgtactggcgtcatgtcgatgaagtcgataacaatcaggccgccgaggtcacgcaggcgcagctgacgagcaatctcatcggcagcttcgaggttagtgttaaacgcggtttcttcgatatcgccgccgcgggtcgcgcgtgcggagttgatgtcgatggccgttaacgcttcggtgctgtcgataacaatcgaaccaccggatggcagacggacttcacgctggaaggcggactcgatctgcgactcgatctggtagtggctgaacagcgggatctcgccggtgtacagtttgattttgctgctgaaatccgggcgacctaatgcagcgatatgctgacgtgccagttcgagcactttcgggttatcgataaggatttcgccgatgtcctgacgtaagtaatcgcggaatgcgcgaacgattacgttgctctcctgatgaatcaggaacggggccgggcggctttcagcggcttttttgatggcttcccagtgtttcagacggaagcttaaatcccattgcagcgcctcagcagatttgccgacgccagcggtgcgcacgataagccccatgccttccggcagttcaaggcttgccagtgcttcttttaattcggtacggtcgtcgccttcgatacggcgagaaatgccncccnnncgcgggttgttcggcatcagaaccagatagctacccgccagactgataaaggtggttaatgccgcgcctttgttgccgcgctcttctttatcgatctgaacaatgacttcctgaccttcacgcaacacatctttaatgttgggacgaccatgagcactgtagttagcagggaaatattcgcgggcaatttcttttagtgggaggaaaccgtgacgttcagcgccgtaatcaacaaaagcagcttccagactcggttcaatgcgggtgattttacctttgtagatgtttgcctttttctgctcgtgccctggactttcgatatccaggtcatacagacgctgcccatctacaagggcaacgcgcaactcttcctgctgagttgcgttgattaacattcttttcatcgtaacttactcattattcttacattgacgactaagctgcgggcaaagtaacgcctttccgggtgtgaaccgatggcctcgtgtctagtcgcgtcgccaacctcacggttatcgtcagctcaaagaggcgcagagtgtcggttgcccgtttttcatgcggaaaaacagcgcaattatcaaagaaacagactgggtattactctccagaaatatttccatctaccggtaaggactgcaacccgcagcccgctaactgcctgaaagatcaatacgtcttacgccattgctgcgtggatgatcggtcgggcaaaatgggttattccgtaaaatttcttgttttaacaaggatggacacggaaacggcctcattattccactgcaagccttgttatagcaagatgacttttaccatttatcacccgcttactcacagttttttcacttcttgctggtgattggtttaataaccatcaataaagtgatcacgtagtgaagtaataaggtgcaaaactaaatataagcatagaaaaatgagtggcgcgaatcctgttggctaattagaatcgcccaccatgaaaacagagactccatccgtaaaaattgttgctatcaccgccgacgaagcggggcaacgtatcgacaactttttgcgtacccaattgaaaggcgtaccaaaaagtatgatttaccgtattttgcgtaaaggcgaagtgcgggtgaacaaaaaacgtattaagcctgaatataaactcgaagcgggtgatgaggtgcgtattccaccggttcgcgttgctgagcgggaagaagaggcggtttcgccacatctgcaaaaggtggcggcgctggcggacgtcatcttatatgaagatgatcacatcctggtgctgaataaaccttccggtacggcggtacatggcggcagtggtttaagcttcggcgttattgaaggtttgcgggcgttgcgcccggaagcgcggttccttgaactggttcatcgtcttgaccgggacacctcaggtgtgttgctggtagcgaaaaaacgctcggcgttgcgttctctgcatgagcaattacgtgaaaaagggatgcaaaaagattacctggcgctggtgcgcggtcagtggcagtcgcatgtgaagagcgttcaggcgccgttattgaaaaatattctgcaaagcggcgaacgtatcgtgcgtgtgagtcaggaaggcaaaccgtcggaaacacgctttaaagtggaagaacgctatgcatttgccaccctggtgcgttgtagtccggtaacagggcgcactcatcagatccgtgtgcatacacagtatgcaggtcatccgattgcctttgacgatcgctacggtgaccgtgaatttgacagacagctcactgaagcaggcacgggattaaatcgtctgttcctgcacgccgcagcgttgaagtttacccatccggggaccggtgaggtgatgcgtatcgaagcgccgatggatgatggtttgaagcgttgtttgcaaaagctgcgtaacgcgcgctaatacgagcatataagcatgataatgggataaggcgtttacgccgcatcaggccgccagcaccgattgccggatgcgacgtaaccgcatccggcgcaaaaaactatcccatcagcgggtttttcccttcccgacgtaacatctgacacagcgcgattagcggtaaaccaaccagcgtgttaggatcacgcccctctaaacgctcaaacagagtaatgccaaatccttcactcttaaagctacccgcgcagtgcaggggatgctctttacgcacgtaattatcaatctccgcctcgctcaggtgacggaaatggacgtcaaaaggctccacttctgtttgcagatgcccattcgccgaattaaacaacgccagtccagtatagaaagtgacgatattgccgctggctttgcgtaattgcagacgggcattttcttccgttaacggtttaccggtgatttcgccatcaagaacacatacctggtctgaaccaataattaaatgatccggataacgtgacgccagagattgcgctttttcttgtgccagtcgaagcaccaactgtcgcggtgattcgtcgctgtgtggagtttcgtcgacctcgggtgctgcacattcaaaagagatttgcagtttttccagaagagcgcgacgccagggcgaggtggaggctaaaataagtttaggcatatttttttccatcagatatagcgtattgatgatagccattttaaactatgcgcttcgttttgcaggttgatgttcgttatcagcactgaacgaaaataaagcagtaacccgcaatgtgtgcgaattattggcaaaaggcaaccacaggctgcctttttctttgactctatgacgttacaaagttaatatgcgcgccctatgcaaaaggtaaaattacccctgactctcgatccggttcgtacggctcaaaaacgccttgattaccagggtatctatactcctgatcaggttgagcgcgtcgccgaatccgtagtcagtgtggacagtgatgtggaatgctccatgtcgttcgctatcgataaccaacgtctcgcagtgttaaacggcgatgcgaaggtgacggtaacgctcgagtgtcagcgttgcgggaagccgtttactcatcaggtctacacaacgtattgttttagtcctgtgcgttcagacgaacaggctgaagcactgccggaagcgtatgaaccgattgaggttaacgaattcggtgaaatcgatctgcttgcaatggttgaagatgaaatcatcctcgccttgccggtagttccggtgcatgattctgaacactgtgaagtgtccgaagcggacatggtctttggtgaactgcctgaagaagcgcaaaagccaaacccatttgccgtattagccagcttaaagcgtaagtaattggtgctccccgttggatcggggataaaccgtaattgaggagtaaggtccatggccgtacaacagaataaaccaacccgttccaaacgtggcatgcgtcgttcccatgacgcgctgaccgcagtcaccagcctgtctgtagacaaaacttctggtgaaaaacacctgcgtcaccacatcactgccgacggttactaccgcggccgcaaggtcatcgctaagtaatcacgcgtctgcgtgatgaagcttagtgaggattttccccaggcaactggggaaagaccaaaccgggcggcgacgataccttgacacgtctaaccctggcgttagatgtcatgggaggggattttggcccttccgtgacagtgcctgcagcattgcaggcactgaattctaattcgcaactcactcttcttttagtcggcaatcccgacgccatcacgccattacttgctaaagctgactttgaacaacgttcgcgtctgcagattattcctgcgcagtcagttatcgccagtgatgcccggccttcgcaagctatccgcgccagtcgtgggagttcaatgcgcgtggccctggagctggtgaaagaaggtcgagcgcaagcctgtgtcngtgccggtaataccggggcactgatggggctggcaaaattattactcaagcccctggaggggattgagcgtccggcgctggtgacggtattaccacatcagcaaaagggcaaaacggtggtccttgacttaggggccaacgtcgattgtgacagcacaatgttggtgcaatttgccattatgggctcagtcctggctgaagaggtggtggaaattcccaatcctcgcgtggcgttgctcaatattggtgaagaagaagtaaagggtctcgatagtattcgggatgcctcagcggtgcttaaaacaatcccttctatcaattatatcggctatcttgaagccaatgagttgttaactggcaagacagatgtgctggtttgtgacggctttacaggaaatgtcacattaaagacgatggaaggtgttgtcaggatgttcctttctctgctgaaatctcagggtgaagggaaaaaacggtcgtggtggctactgttattaaagcgttggcnacaaaagagcctgacgaggcgattcagtcacctcaaccccgaccagtataacggcgcctgtctgttaggattgcgcggcacggtgataaaaagtcatggtgcagccaatcagcgagcttttgcggtcgcgattgaacaggcagtgcaggcggtgcagcgacaagttcctcagcgaattgccgctcgcctggaatctgtatacccagctggttttgagctgctggacggtggcaaaagcggaactctgcggtagcaggacgctgccagcgaactcgcagtttgcaagtgacggtatataaccgaaaagtgactgagcgtacatgtatacgaagattattggtactggcagctatctgcccgaacaagtgcggacaaacgccgatttggaaaaaatggtggacacctctgacgagtggattgtcactcgtaccggtatccgcgaacgccacattgccgcgccaaacgaaaccgtttcaaccatgggctttgaagcggcgacacgcgcaattgagatggcgggcattgagaaagaccagattggcctgatcgttgtggcaacgacttctgctacgcacgctttcccgagcgcagcttgtcagattcaaagcatgttgggcattaaaggttgcccggcatttgacgttgcagcagcctgcgcaggtttcacctatgcattaagcgtagccgatcaatacgtgaaatctggggcggtgaagtatgctctggtcgtcggttccgatgtactggcgcgcacctgcgatccaacagatcgtgggactattattatttttggcgatggcgcgggcgctgcggtgctggctgcctctgaagagccgggaatcatttccacccatctgcatgccgacggtagttatggtgaattgctgacgctgccaaacgccgaccgcgtgaatccagagaattcaattcatctgacgatggcgggcaacgaagtcttcaaggttgcggtaacggaactggcgcacatcgttgatgagacgctggcggcgaataatcttgaccgttctcaactggactggctggttccgcatcaggctaacctgcgtattatcagtgcaacggcgaaaaaactcggtatgtctatggacaatgtcgtggtgacgctggatcgccacggtaatacctctgcggcctctgtcccgtgcgcgctggatgaagctgtacgcgacgggcgcatcaagccggggcagttggttctgcttgaagcctttggcggtggattcacctggggctccgcgctggttcgtttctaggataaggattaaaacatgacgcaatttgcatttgtgttccctggacagggttctcaaaccgttggaatgctggctgatatggcggcgagctatccaattgtcgaagaaacgtttgctgaagcttctgcggcgctgggctacgacctgtgggcgctgacccagcaggggccagctgaagaactgaataaaacctggcaaacccagccagcgctgttgactgcctctgttgcgctgtaccgcgtatggcagcagcatggcggtaaagcaccggcaatgatggccggtcacagcctgggggaatactccgcgctggtttgcgctggtgtgattgatttcgctgatgcggtgcgtctggttgagatgcgcggcaagttcatgcaagaagccgtaccggaaggaacgggcgctatggcggcaatcatcggtctggatgatgcgtctattggaaaagcgtgtgaagaagctgcagaaggtcaggtcgtttctccggtaaactttaactctccgggacaggtggttattgccggtcataaagaagcggttgagcgtgctggcgctgcctgtaaagctgcgggcgcaaaacgcgctctgccgttaccagtgagcgtaccgtctcactgtgcgctgatgaaaccagcagccgacaaactggcagtagaattagcgaaaatcacctttaacgcaccaacagttcctgttgtgaataacgttgatgtgaaatgcgaaaccaatggtgatgccattcgtgacgcactggtacgtcagttgtataacccggttcagtggacgaagtctgttgagtacatggcagcgcaaggcgtagaacatctctatgaagtcggcccgggcaaagtgcttactggcctgacgaaacgcattgtcgacaccctgaccgcctcggcgctgaacgaaccttcagcgatggcagcggcgctcgagctttaaaagaggaacatcatgaattttgaaggaaaaatcgcactggtaaccggtgcaagccgcggaattggccgcgcaattgctgaaacgctcgcagcccgtggcgcgaaagttattggcactgcgaccagtgaaaatggcgctcaggcgatcagtgattatttaggtgctaacggcaaaggtctgatgttgaatgtgaccgacccggcatctatcgaatctgttctggaaaaaattcgcgcagaatttggtgaagtggatatcctggtcaataatgccggtatcactcgtgataacctgttaatgcgaatgaaagatgaagagtggaacgatattatcgaaaccaacctttcatctgttttccgtctgtcaaaagcggtaatgcgcgctatgatgaaaaagcgtcatggtcgtattatcactatcggttctgtggttggtaccatgggaaatggcggtcaggccaactacgctgcggcgaaagcgggcttgatcggcttcagtaaatcactggcgcgcgaagttgcgtcacgcggtattactgtaaacgttgttgctccgggctttattgaaacggacatgacacgtgcgctgagcgatgaccagcgtgcgggtatcctggngcaggttcctgcgggtcgcctcggcggcgcacaggaaatcgccaacgcggttgcattcctggcatccgacgaagcagcttacatcacgggtgaaactttgcatgtgaacggcgggatgtacatggtctgaccgcgatttgcacaaaatgctcatgttgcgcgcagtctgcgtggttatgagtaataattagtgcaaaatgatttgcgttattggggggtaaggcctcaaaataacgtaaaatcgtggtaagacctgccgggatttagttgcaaatttttcaacattttatacactacgaaaaccatcgcgaaagcgagttttgataggaaatttaagagtatgagcactatcgaagaacgcgttaagaaaattatcggcgaacagctgggcgttaagcaggaagaagttaccaacaatgcttctttcgttgaagacctgggcgcggattctcttgacaccgttgagctggtaatggctctggaagaagagtttgatactgagattccggacgaagaagctgagaaaatcaccaccgttcaggctgccattgattacatcaacggccaccaggcgtaagtgaacatctccaggcggtcgttcgaccgcctgagttttatctttttgtcccactagaatcattttttccctccctggaggacaaacgtgtctaagcgtcgtgtagttgtgaccggactgggcatgttgtctcctgtcggcaataccgtagagtctacctggaaagctctgcttgccggtcagagtggcatcagcctaatcgaccatttcgatactagcgcctatgcaacgaaatttgctggcttagtaaaggattttaactgtgaggacattatctcgcgcaaagaacagcgcaagatggatgccttcattcaatatggaattgtcgctggcgttcaggccatgcaggattctggccttgaaataacggaagagaacgcaacccgcattggtgccgcaattggctccgggattggcggcctcggactgatcgaagaaaaccacacatctctgatgaacggtggtccacgtaagatcagcccattcttcgttccgtcaacgattgtgaacatggtggcaggtcatctgactatcatgtatggcctgcgtggcccaagcatctctatcgcgaccgcctgtacttccggcgtgcacaacattggccatgctgcgcgtattatcgcgtatggcgatgctgacgtgatggttgcaggtggcgcagagaaagccagtacgccgctgggtgttggtggttttggcgcggcacgtgcattatctacccgcaatgataacccgcaagcggcgagccgcccgtgggataaagagcgtgatggtttcgtactgggcgatggtgccggtatgctggtacttgaagagtacgaacacgcgaaaaaacgcggtgcgaaaatttacgctgaactcgtcggctttggtatgagcagcgatgcttatcatatgacgtcaccgccagaaaatggcgcaggcgcagctctggcaatggcaaatgctctgcgtgatgcaggcattgaagcgagtcagattggctacgttaacgcgcacggtacttctacgccggctggcgataaagctgaagcgcaggcggtgaaaaccatcttcggtgaagctgcaagccgtgtgttggtaagctccacgaaatctatgaccggtcncctgttaggtgcggcgggtgcagtagaatctatctactccatcctggcgctgcgcgatcaggctgttccgccaaccatcaacctggataacccggatgaaggttgcgatctggatttcgtaccgcatgaagcacgtcaggtcagcggaatggaatacacgctgtgtaactccttcggcttcggtggcactaatggttctttgatctttaaaaagatctaagttgtcattttccacccatataaaaggtccgcttgcgggccttttttcttagcttttattccgacttgttccgtagtgaacatgctgccacactaacaattctctgataaggagccggtatgttcttaattaacggttataagcaggaatcgctgtcagtaagcgatcgggcaacgcagtttggtgatggttgttttaccaccgccagagttatcgacggtaaagtcagtttgttatcggcgcatatccagcgactacaggatgcttgtcagcggttgatgatttcctgtgacttctggcctcagcttgaacaagagatgaaaacgctggcagcagaacagcaaaatggtgtactgaaagtcgtgatcagtcgcggtagtggcgggcgagggtacagcacattgaacagtggaccggcaacgcggattctctccgttacggcttatcctgcacattacgaccgtttgcgtaacgaagggatcacgttggcgctaagcccggtgcggctggggcgcaatcctcatcttgcaggtattaaacatcttaatcggcttgagcaagtattgatccgctctcatcttgagcagacaaacgctgatgaggcgctggtccttgacagcgaagggtgggttacggaatgctgtgcagctaatttgttctggcggaagggcaacgtagtttatacgccgcgactggatcaggcaggtgttaacggcattatgcgacaattctgtatccgtttgctggcacaatcctcttatcagcttgtcgaagtgcaagcctctctggaagaggcgttgcaggcagatgagatggttatttgtaatgcgttaatgccagtgatgcccgtacgtgcctgtggcgangtctccttttcgtcagcaacgttatatgaatatttagccccactttgtgagcgcccgaattagtcatgaaaaaagtgttattgataatcttgttattgctggtggtactgggtatcgccgctggtgtgggcgtctggaaggttcgctatcttgccgactgcaaattgcttatcaaagaagagacgatatttaccctgaagccagggaccggacgtctggcgcttggtgaacagctttatgccgataagatcatcaatcgcccacgggtttttcaatggttgctgcgtatcgaaccggatctttctcactttaaagccgggacttaccgctttacaccgcagatgaccgtgcgcgagatgctgaaattgttggaaagcggtaaagaagcacagttccctctgcgactggtagaagggatgcgtctgagcgactacctcaagcaattgcgtgaggccccgtatatcaagcacacgctgagcgatgataagtacatcaccgtagcgcaggcacttgaactggaaaacccggagtggattgaaggttggttctggccagacacctggatgtataccgccaataccaccgatgtcgcgttactcaagcgagcgcacaagaaaatggtgaaagcggtcgatagcgcctgggaagggcgtgcggacggtctgccttataaagataaaaatcagctggtgacgatggcatcaattatcgaaaaagaaaccgccattgccagtgaacgcgatcaggttgcctcggtatttatcaaccgtttacgcattggtatgcgcctgcagaccgacccaaccgtgatttacgggatgggagagcgttataatggcaaactttctcgtgcagacctggaaacgccgacagcgtataacacctataccattaccggtttgccgccgggtgcgatagctacgccgggggcggattcgctgaaggctgctgcgcatccggcaaaaacgccgtatctctattttgtggccgatggtaaaggtggtcacacgtttaataccaatcttgccagtcataacaagtctgtgcaggattatctgaaagtgcttaaggaaaaaaatgcgcagtaagtatatcgtcattgaggggctggaaggcgcaggcaaaactaccgcgcgtaatgtggtggttgagacgctcgagcaactgggtatccgcgacatggttttcactcgggaacctggtggtacgcaacttgccgaaaagttaagaagcctggtgctggatatcaaatcggtaggcgatgaagtcattaccgataaagccgaagttctgatgttttatgccgcgcgcgttcaactggtagaaacggtcatcaaacctgcgctggctaacggcacctgggttattggcgatcgccacgatctctccactcaggcgtatcagggcggaggacgtggtattgaccaacatatgctggcaacactgcgtgatgctgttctcggggattttcnccccgacttaacgctctatctcgatgttaccccggaagttggcttaaaacnnnnnnnnnnncgcggcgagctggatcgtattgagcaagagtctttcgatttctttaatcgcacccgcgcccgctatctggaactggctgcacaagataaaagtattcataccattgatgccacccagccgctggaggccgtgatggatgcaatccgcactaccgtgacccgctgggtgaaggagttggacgcatgagatggtatccatggttacgacctgatttcgaaaaactggtagccagctatcaggccggaagaggtcaccatgcgctactcattcaggcgttaccgggcatgggcgatgatgctttaatctacgccctgagccgttatttactctgccaacaaccgcagggccacaaaagttgcggtcactgtcgtggatgtcagttgatgcaggctggcacgcatcccgattactacaccctggctcccgaaaaagggaaaaatacgctgggcattgatgcggtacgtgaggtcaccgaaaagctgaatgagcacgcacgcttaggtggtgcgaaagttgtctgggtaaccgatgctgccttactgaccgacgccnnnnntaacgcattgctgaaaacgcttgaagagccaccagcagaaacctggtttttcctggctacccgcgagcctgaacgtttactggcaacgttacgtagtcgttgtcggttacattaccttgcgccgccgccggaacagtacgccgtgacctggctttcacgcgaagtgacaatgtcacaggatgcattacttgccgcattgcgcttaancgccggttcgcctggcgcggcactggcgttgtttcagggagataactggcaggctcgtgaaacattgtgtcaggcgttggcatatagcgtgccatcgggcgactggtattcgctgctggcggcccttaatcatgaacaagctccggcgcgtttacactggctggcaacgttgctgatggatgcgctaaaacgccatcatggcgctgcgcaggtgaccaatgttgatgtgccgggcctggtcgccgaactggcaaaccatctttctccctcgcgcctgcaggctatactgggggatgtttgccacattcgtgaacagttaatgtctgtcacaggcatcaaccgcgagcttctcatcaccgatcttttactgcgtattgagcattacctgcaaccgggcgttgtgctaccggttcctcatctttaagagagacatcatgtttttagtcgactcacactgccatctcgatggtctggattatgaatctttgcataaggacgtggatgacgttctggcgaaagccgccgcacgcgatgtgaaattttgtctggcagtcgccacaacattaccgggttatttacacatgcgggatctggtaggcgaacgtgacaacgtcgtattttcttgtggcgtgcatccactcaaccagaatgatccctacgatgtagaagatttacgccgtctggcggcagaagagggtgttgtagcgctgggtgaaaccgggctggattattattacacaccggaaactaaagtacgtcagcaagagtccttcatccatcatatccagattggtcgtgaactgaacaagccggttatcgtccatacccgtgacgcccgcgccgatacgctggcaattctgcgcgaagaaaaagtgacggattgcggtggcgtactacactgttttacagaggacagagaaacggcgggcaaattactggatctcggattttacatctccttttccggcattgtgaccttccgtaatgcggagcaactgcgcgatgctgcgcgttatgtccccctggatcggttactggtggaaactgactcaccttaccttgcgccggtgccgcatcgaggaaaagagaatcaacctgcgatggttcgtgacgttgcagaatacatggctgtgttgaaaggtgttgccgttgaagaactggcgcaggtnaccaccgataacttcgcccgtctgtttcacatcgacgcttcccgccttcaatccatccgttgaatgagtttttttaaagctcgtaattaatgactaaaaacgagtaaagttcaccgccgaaaattgggcggtgaataaccacgtttgaaatattgtgacatatgttttgtcaaaatgtgcaacttctccaatgatctgaagttgaaacgtgatagccgtcaaacaaattggcactgaattattttactctgtgtaataaataaagggcgcttagatgccctgtacacggcgaggctctccccccttgccacgcgtgagaacgtaaaaaaagcacccatactcaggagcactctcaattatgtttaagaatgcatttgctaacctgcaaaaggtcggtaaatcgctgatgctgccggtatccgtactgcctatcgcaggtattctgctgggcgtcggttccgcgaatttcagctggctgcccgccgttgtatcgcatgttatggcagaagcaggcggttccgtctttgcaaacatgccactgatttttgcgatcggtgtcgccctcggctttaccaataacgatggcgtatccgcgctggctgcagttgttgcctatggcatcatggttaaaaccatggccgtggttgcgccactggtactgcatttacctgctgaagaaatcgcctctaaacacctggcggatactggcgtactcggagggattatctccggtgcgatcgcagcgtacatgtttaaccgtttctaccgtattaagctgcctgagtatcttggcttctttgccggtaaacgctttgtgccgatcatttctggcctggctgccatctttactggcgttgtgctgtccttcatttggccgccgattggttctgcaatccagaccttctctcagtgggctgcttaccagaacccggtagttgcgtttggcatttacggtttcatcgaacgttgcctggtaccgtttggtctgcaccacatctggaacgtacctttccagatgcagattggtgaatacaccaacgcagcaggtcaggttttccacggcgacattccgcgttatatggcgggtgacccgactgcgggtaaactgtctggtggcttcctgttcaaaatgtacggtctgccagctgccgcaattgctatctggcactctgctaaaccagaaaaccgcgcgaaagtgggcggtattatgatctccgcggcgctgacctcgttcctgaccggtatcaccgagccgatcgagttctccttcatgttcgttgcgccgatcctgtacatcatccacncgattctggcaggcctggcattcccaatctgtattcttctggggatgcgtgacggtacgtcgttttcgcacggtctgatcgacttcatcgttctgtctggtaacagcagcaaactgtggctgttcccgatcgtcggtatcggttatgcgattgtttactacaccatcttccgcgtgctgattaaagcactggatctgaaaacgccgggtcgtgaagacgcgactgaagatgcaaaagcgacaggtaccagcgaaatggcaccggctctggttgctgcatttggtggtaaagaaaacattactaacctcgacgcatgtattacccgtctgcgcgtcagcgttgctgatgtgtctaaagtggatcaggctggcctgaagaaactgggcgcagcgggcgtagtggttgctggttctggtgttcaggcgattttcggtactaaatccgataacctgaaaaccgagatggatgagtacatccgtaaccactaatccgtaagacgttggggagactaaggcagccagatggctgccttttttacaggtgttattcagaattgatacgtgccggtaatgctgaaattacgcggtgcgccgtagacgatagaaccttccacgttggtatcgtaggttttgtcgaacaggttattgacgttcccctgtaacgagaagtttttcgtcacctggtagcgggtgaagagatccaccaacgcgtagctaccttgctcggcgcggaaggtgccatacggtgtcacggtgtcggtatacacgcgattttgccagttaacaccaccgccgactgtcaactctggcatgacaggcaaccgatagctggtgaacattttaaccgtggtgcgtggcagattaggattaacggcgtttccttcgttatcctctgcaatatagcgcgttgcgccaaatgtcagctgccagttgtcggtaattgcgccgttgagttcaaattccacccctttactgactgtcccatccaccgctttataggcggtttcgccgttgctgccggggataggtgtaccggtggactgagcgacattatcctgctcaatacggaagatggctaacgtggtggtcagacggctattcatccagtccgatttcagacccagctcgtagttgttaccggtgattggagccagatatttgcctgaactgtcacgatcattttgcggctggaaaatagaggtatagctggcgtaggtcgaccagttgtcattgatgtcaaacaccagaccagcgtaaggcgtggtgtggtttttctccatgctgtaagtcagcgtatcaacccgccagttggtataacgtgcgccgaggatcagatgcagcggatcggcaagggtgacacgagtggcagcatataacgatttcatatgtgtggtatcgtcctgcgccaggctctgtggtgaccagtcggtttgtgggaaattgccattaaagttgtagaaactgccaatttcatccgggaagatgttggcccatgaactgaagtaacgattgttttgtttgctgtaactgccaccaaacattagattgtgctgacgaccaaacaattcataactaccgtcagcgaacaaatccagcgcatcaactttacgtttgccactgttccaaccggtgccgccgacataatcaaagccaggtccataattactgtatggcccaaccagcataccatccgctttgtttacataggcatcgacatacatcattttgctgtcaaattcgacttcagagtgggtggcattcagtgtcgcttgccaggtatcagcaaaccgctgcttcagggtcataaagaccttgttgatctctttatcgttgtacgcccagtcaggtgcggtactgcgtgcgcgatcgtaactgttgctgctgccatcagtattccagcgcggtaaaccgccccaggttgggctattaacatcaatgcgctgatattcgtaaccggctgaaagcgtcgtaagatcgcctaaatcagcatcgacaatgccggagaagaaggtcttttcactattgtagcggtccagccatgagtcgttattctggtagccgccgacannncnnnnnnggattttaccgtcttcggtgagtgggctttgtaaatccgccacataccgttctttgttccagctaccgtattccgccgagacatcgcctttaaattcacgactggtcgcgtgttttcgaaccatattaattgccgcagatggattacccgtcccggtcatgagtcctgtcgcgccacgcactacttctacgcgttcaaacagtgccatatcagaaagtgcgtcgcccagattccagcgcgattcaaaataggtggggataccatcaaccatatagttatcgatctggaatccgcgggaataataaagagcacgatcggaatccgcctgacttttgctgatccccagcgtgttttccatcacttcgcccagcgtttgtaactgctgatcttccatccgctgctggctaacaatagtgaccgactgaggaatatcacgttgagtcatctgcattttggtacccgcagaggtagacgttacgctgtaatcattttcgccatcatctggagctgtggctgaaccctcaacaatcaccgtttcttcagtggctggtgcagcaaaagcggcagaaggtaatagtgccagtgctatgcaaccggcaagtagtgacggtttggtgatggcttgatattgattatccctgttaaattgtgttgaaagcatttgaaatctcttggtttatgttgtcgtcaggctcatgccggaggagggtgatgagcggttatatttagtgtgcgaataattttgtttgtaaatgcaaatgagaaatatacgcattcatatttgtcgtgtaaaccaaacagagaatgtcttttcagcgcattcgcaggcagaaatgggaataatggagatatatacggcagcaaaacgattttttgcttaagaaatcgtgagttaaggttgaaagagcaggtttaactcgaccatactctatactcgcagtgtggcgcggcgtagcatggcgcaacgcatggctatttgaaaaaggaaaatgtcgtggcagaagaaactatattcagcaaaattattcgtcgtgagatcccctccgatatcgtctaccaggatgatctggtaacggcgtttcgcgatatttcgccgcaagcgccaacgcatattctgatcattccgaatatcctcattccgactgtgaacgacgtctcagctgagcatgagcaggcgctgggacgcatgatcaccgtagcggcaaaaattgctgagcaagaaggtattgccgaagatggctatcgtctgatcatgaacaccaaccgccatggcggacaagaggtttaccacatccatatgcacttgttgggtggccgtccgctgggaccaatgctggcgcataaaggtctgtaacgatgagaaaaggatgctttgggctggtgtctctggcgttgttactgctggtgggctgtcgttcacatccggaaattccggtgaatgatgagcaatcgctggtgatggagtcatctttattggctgcgggcatcagtgcagaaaagcccgtcctttcgacgtctgatattcaaccttcagcatcctcaacgctttataacgaaaggcaagaacccgttaccgttcattatcgtttttactggtatgacgccagagggctggagatgcatcctctggaaaggccacgcagcgttaccattcccgcacattcggcggtaacgctgtacggcagcgccaattttctgggggcgcacaaagtcagactttatctatatttgtaaggggtgaatcttgatgacaaaaatgagtcgctacgccttgattaccgcgctggcgatgtttctcgccgggtgtgtggggcaacgtgaacctgcaccggtagaagaagtgaaaccagcgccggaacaaccagccgagccacaacagcctgtccccacagtgccctcggtgccgacgatcccgcagcagccaggcccaattgagcacgaagatcaaactgcaccgcctgcgccgcatattcgccattatgactggaatggcgcaatgcagccgatggtcagtaagatgcttggggctgacggggtgactgcgggtagcgtcctgctggttgatagcgttaacaaccgtactaacggttcgctgaatgccgcagaagcgaccgaaacgctgcgaaatgcgctggctaataacgggaaatttaccctggtttccgcccagcagctgtcgatggctaagcaacagttaggtttgtcgccgcaggatagtttaggcacccgtagtaaagccataggcattgcccgcaatgtcggcgctcattacgtgctgtactccagcgcctctggcaacgttaacgctccgaccctacaaatgcagctgatgctggtgcagacgggcgaaattatctggtcaggtaaaggtgccgtttcgcagcaataatcccatcacgcgcgacgaattgctgtcgcgctttttcccgcagtttcatcccgtcacgacgtttaatagtgggcttagtggcggtagttttctcattgaacatcagggccagcgttttgttgtgcgtcagccgcacgatcctgatgcgccgcagtccgcgttcttgcgccagtatcgggctttatcacaactacccgcatgcattgcaccgaagccgcatttatatctccgtgactggatggtagtcgactatctgcccggcgaggtaaaaacgtatttgccggataccaacgaactggcaggcttgctgtattatctacatcaacaaccacgttttggctggcgaataacgctgttgccgttactggaactgtactggcagcaaagcgatccggcgcggcggacagtgggttggctgcgaatgttaaaacgtctgcgcaaagcgcgggaaccacggcctttacgcttaagtccattgcatatggatgtccacgccggaaatttagtgcatagcgcgtcagggttaaaactcatcgactgggagtatgcaggagatggtgatatcgcgctggaactggcggcggtgtgggtggaaaatactgaacagcaccggcaattggtcaatgactatgccactcgcgcgaagatttatccggcgcaattatggcgtcaggtcaggcgatggtttccctggctgctgatgctcaaagcagggtggtttgagtaccgctggcgacaaaccggcgatcaacaatttatcaggctggccgatgacacctggcggcagctattaataaaacaataaggagagcagtgtgggtccagtaatgttggatgtcgaaggttacgaactggacgcggaagagcgtgaaatactggcgcatccgctggtgggagggctgattctctttacgcgaaactatcatgatcctgcccagttgcgtgaactggtgcgccagatccgcgcagcatcgcgcaatcatctggtggtggcggtagatcaggaaggtggacgcgtccagcgttttcgcgaaggttttacccgcttaccggcagcacaatcctttgctgcgctgttgggaatggaagagggcggcaaactggcgcaagaggcgggttggctgatggccagcgaaatgatcgctatggatattgatatcagctttgcgccagtgctggatgtaggacatatcagcgcggcgattggcgagcgttcttatcatgccgacccagaaaaagccntggcaatcgccagtcggtttattgatgggatgcatgaagccggaatgaaaacgaccgggaaacacttcccaggacacggtgcagtaactgcagattcacacaaagagacgccgtgcgacccacgcccgcaagcggaaattcgtgccaaagatatgtcggttttcagcacgttaatccgcgaaaataaactcgacgccattatgcctgcgcatgtgatctacagtgatgttgatccgcgtccggcgagcggttcttcctactggctgaaaaccgttttgcgtcaggaactgggttttgacggcgtgattttctctgacgatttatcgatggaaggtgccgcgattatgggcagttatgccgaacgcgggcaggcatcactggatgcgggttgcgatatgatcctggtctgcaataatcgtaaaggggccgtcagcgtgttagataatctgtcaccgatcaaggcagaacgtgttacacgtttgtatcataaaggttcattttcgcgacaggaactgatggactcggctcgctggaaagcgatcagcgcccgtctgaatcagttacatgaacgctggcaggaagagaaagcaggtcactaaccctggcttatgtgaggaagcgatgattatctatttacacggttttgactctaacagtccgggtaaccacgagaaagtcttacaattgcagtttattgacccggatgtacgcttgataagctacagtacgcggcatccgaaacatgatatgcagcatctgctcaaagaagtggacaaaatgttgcaactgaacgtcgacgagcgtcccctgatttgcggcgttngtctgggcggatactgggcggaacggattggttttctttgcgatatccgccaggtgatcttcaaccctaatttgttcccttatgagaacatggaaggcaagattgatcgcccggaagagtatgccgatattgccactaagtgtgtgaccaacttccgcgagaagaatcgcgatcgttgcctggtgattttgtcgcgtaatgatgaagcgcttaacagccagcggacatctgaagagttgcatcattattacgagattgtctgggacgaagagcagacgcacaaattcaagaatatctccccgcatttgcagcgcattaaagcgttcaaaaccctcgggtaaatgccctcgtcgcatcaggtaaccttgccggtacctgatgcgctccgaattctgtaagtcggataaggcgttcacgccgcatccgacagtcgagcatcaatgcctgatgcgcctcttatcagacctaccgaacgccctacatacacccctcacgctatatcactctcacaaattcgctcaaataataaacaataaactctgttttttgatnnnnacccggtaaagtcgcctatcttttcagcaacaaaacttgattaacatcaattttggtatgaccaatgcaccattcatgttattctcaatagcgaagaacattttcattgctgtaacctgttgttaattaagagctatgttaataaccattaattaacaattggttaanaaatttaagggggtcacgttgactacgccattgaaaaaaattgtgattgtcggcggcggtgctggtgggctggaaatggcaacacagctggggcataagctgggacgcaagaaaaaagccaaaattacgctggtcgatcgtaaccacagccacctgtggaaaccgctgctgcacgaagtagcgactggctcgcttgatgaaggcgtcgatgcgttgagctatctggcccatgcgcgcaatcatggtttccagttccagctgggttccgtcattgatattgatcgtgacgcgaaaacaatcactattgcagaactgcgcgatgagaaaggtgaactgctggttccggaacgtaaaatcgcctatgacaccctggtaatggcgctgggtagcacctctaacgatttcaatacaccaggtgtcaaagagaactgcattttcctcgataacccgcaccaggcgcgtcgctttcaccaggagatgctgaatctcttcctgaaatactccgccaacctgggcgcaaatggcaaagtgaacattgcgattgtcggcggcggcgcgacgggtgtagaactctccgctgaattgcacaacgcggtcaagcaactgcacagctacggttacaaaggcctgaccaacgaagccctgaacgtaacgctggtagaagcgggagaacgtattttgcctgcattaccgccacgtatctctgctgcggcccacaacgagctaacgaaacttggcgttcgcgttctgacgcaaaccatggtcaccagtgctgatgaaggcggcctgcacactaaagatggtgaatatattgaggctgatctgatggtatgggcagccgggatcaaagcgccagacttcctgaaagatatcggtggtcttgaaactaaccgtatcaaccagctggtggtggaactgacgctgcaaaccacccgcgatccagacatttacgctattggcgactgcgcgtcatgcccgcgtccggaagggggctttgttccgccgcgtgctcaggctgcacaccagatggcgacttgcgcaatgaacaacattctggcgcagatgaacggtaagctgctgaaaaattatcagtataaagatcatggttcgctggtatcgctgtcgaacttctccaccgttggtagcctgatgggtaacctgacgcgcggctcaatgatgattgaaggacgaattgcgcgctttgtatatatctcgctataccgaatgcatcagattgcgctgcatggttactttaaaaccggattaatgatgctggtggggagtattaaccgcgttatccgtccgcgtttgaagttgcattaatcgacgtacactggcggatgtggcataaacgcctcatccgccctggacaaatggtacgagcggtaggcctgataagacgcgttaagcgtcgcatcaggcattccttcagactcctccgaatccttaagtatttccagccattcccgcgcttttcatcttctgtctgatagctgcttttctccttcgcttgcatgattggcataactgcaaagaangaggtattcccgtgaataaatcaatgttggcgggtatcgggattggtgtcgcagctgcgcttggcgtagcggcagtggccagtctgaacgtgtttgaacgtggcccgcaatacgctcaggttgtttctgcaaccccaatcaaggaaacggttaaaacaccgcgtcaggagtgtcgcaacgtcacagtgacccatcgtcgaccggtgcaggatgaacatcgcattaccgggtcggtgctcggcgctgttgctggcggcgtgatagggcatcagtttggtggtggtcgtggtaaagatgtcgccactgttgtgggggcgctgggtggtggatatgccggtaaccagatccagggctctctccaggaaagcgatacttacacgactacgcaacagcgttgtaaaacggtgtatgacaagtcagaaaaaatgctcggttatgatgtgacctataagattggcgatcagcagggcaaaatccgcatggaccgcgatccgggtacgcagatcccgctagatagtaacgggcaactgattttgaataacaaagtataacaaggctgtactctgcaatttggcccctcattcgctcaggctgaggggctttttttgcgacttatttcaccagttcgggccataaacgcaaagtcgttccggcaatctgcatcagtttttccaacgatgcaccttcgcgtgcgctgatcgacatcccctgaataatacaattaaggaattctgccagatgtgtcacgtcacagtgggtcgggatttccccgcgcgcttgtcgttgacataaaaactgctgcaaagtgcgctcttgcatcgcatggcgtgatttcaacgtattggcgatatctcctgaatctggggagagggtggtgcagttgttgatcatgaagcagcctgccggggtgtctttgccggtaaagcagttggcgatggcagcaaaatagtcagccagcgcagactccacgcttttctcttcacaaaacagctgtgcttcatgcttagcggcaaaacgatcgatatagcggtcgagaacggcacgaaataacccctctttgttggtaaattccgcgtatagcgtgggcgctttggctccggtcgcttcgacgaggtccgcaagagaagtcgcttcataaccgtgttgccagaacaatttcatggccttatcaagcgcggcatccctgtcgaacacttttgggcggccacggcttttttttacacattgtgttgagtcagttgccatgatgccgttgtacctggtgactgtgaatgaaaggttattataaaaataatcacctccgttcaccagtccagatcccataaaaataattgctttctatttaactgaaatnnnnnnnnttttaanntaattaatgattgttataaaaaatatcttgtatgtgatccagatcacatctatcatttagttatcgatcgttaagtaattgcttgcgacgtcattcatctgcataaggccactattatgaaaaacgtaaaaaccctcatcgctgcggcgattttaagctccatgtcatttgccagctttgcggctgtcgaagttcagtcaacgccagaaggccaacaaaaagtcggtacaatcagtgctaacgcggggacaaatctgggatcgctggaagagcagctggcgcaaaaagcggatgagatgggcgcaaaatctttccgtattacttctgtaaccggtccgaataccctccatggaacagcagtaatttataaataagcattaaccctcattaatgcctgctactgctgattttttccccgcgacatgccgtgtcgcggggattttttttatccaggatttacagcgtttgtgggctcacttgatgacggcggacatccaccggcatcccggaacggacatccatcacatgttgcatcacttcagcgtcagtttgtgctgcatctttaaatgattgcattgcgctattcagcgtaattggcagcagctgcggatcgtcatcaatcttctctgacagcggctgatgtacttcaaccagacgctcaccgtttggttcggcagagacttttatcggagtgttgatgatattcactttggtgcctggggtgacctggctaaagagtgttttgatatcgtcatcccgcagacgaatacagccagaacttacccgcatgccaatgccgaaatcggcgttcgtaccgtgaagcaaataaacgccgccataggccgccagacgaatcgcatgatggcccattggattatccggtccagccggcactaccgcaggcaactcaattccttgtgccttataccgcgcgcgaatgtttgccgttggcgtccaggttgggtttgcacgcttgtcagaaacggtggtcaccattgtcggtgtcagcgtgtcaccacctaactgaccaatacctattggatacacggttaccgaatttttacccggcgggtagtaatagagacgaagctccgcaatgttgatcacaatgccttcgcgcggcgcgtctggaagtagggtttgcaacgggatcgttaacacgctgcccgcgcgcggtacgtaaggatcaacgccggggttagcctgtaatagagcgagaaagccgacgttatattttttggcgatggcttccagagaaccaccgtcattttccaccacatgaaatttgttttcgccaaccagacgactgcccgctggcggcagcggccaggtgttggcttttgccggtagcgccagcgccacggcagcggcgaacgtaaaaaacgttagccagcgagaaaaacgcgttttgatcatcaccaaaaatccataataaatataaggttattgtaataaacagataagcctgaattatggatggtgacagtgtcggatagtgcagggaagtgcaaagaatttgtaaatgttgcagatgggggngcagaaacgcccccgatttaccattaagcgatcgcgttttcttccagttcacgcataaactggcgtacccattcgatacgcgttttccgctcactcaaatcctgaataaatttcaggcgcgtcggaccatcaaggcggtaatgctgcggctgtttttgcagcaaaccaatcaaccaggccggattaacgtgattcttctcggcaaattcgatcacgccgcctttctcattaccttccagcttcctgatccccagtttctgcgcttgctggcgtagacgggcaatatccagcagggtacgcgccggatccggcagcaggccgaagcgatcgataagctcgactttgatctcttccagttcgttttccgttttggcgctggcaatacgtttatagaacgacagacgcgtattcacgtcaggaatgaaatcatctggcaatagcgacggcatccgcagctcgacttctgtttgctggctggtgagatcttccagcgacggctcgcgtccggctttcagtgcatcgacggcgttttccagcaactccatatacagcgagaaaccgatggtttccattgagccgctttgttcttcgccaagcagttcacccgcgccgcgaatctccagatcgtgcgttgccagcgcaaaacctgccccgagatcttccagcgaggcaatcgcttcaagacgtttttgtgcatcggtagtcatcgcttttggatgcggcgtcagcagccatgcatatgcctgatgatgcgaacgtccgacgcgaccgcgtaactggtgcagttgcgccagaccgaagtgatccgcgcgttcaatgataatggtgttggctgtcgggatgtcgatcccggtttcgataatggttgtacaaaccagcacgttgaaacgttgatgatggaaatcattcatcacccgttccagttcgcgctcgcgcatctgcccgtgaccgatggcgatccgcgcttctggcaccagttctgccagccgttcggcggctttctgaatgttttccacatcattgtagagataataaacctgtcctccgcgcaaaatttcacgcaggatcgcctcgcggaccaccaggctgtcatactcacggacaaaggttttaactgccagacgacgggcgggcggcgtggcgataatcgacaggtcacgcattccgctcattgccatattcagcgtacgtgggatcggcgttgcagtaagcgtcagaatatccacgttcgcgcgcatcgctttaatgcgctctttatgacgcaccccgaagcggtgttcttcatcgacaatcagcaggcctaaatctttaaacttgacgtcactttgcagcagtttgtgcgtaccgatcagaatatcgattttcccttccgccacttccgcaaggatttgcgtctgctctttggcgctgcgganacgggagagcatttcgatacgtaccggccagttggcgaaacggtcgcggaagttgtcgtaatgctgctgcgcgagaagggtggtaggcaccagcaccgccacctgcttgtggttatctactgccaggaaagcggcgcgcatcgccacttctgttttaccaaagccaacatcgccgcacaccagacgatccattgccagcggctgacncatgtcgctaagtaccgcattaatggcctgcgcctgatccggcgtggtttcaaacgggaagctgtcgcagaacaactgatactgctcacgatcgtgtttaaacgcgaagccctctttggcggcgcgttgcgcgtagatatccagcaattccgccgccacatcacgcactttttccgccgcnntcnnnnncgcgcgtgaccacgcatcgccgccaagtttatgcagcggggcattttcttccgcaccacccgcgtaacggctaatcagatgcagcgacgacaccggaacatacaatttggcgtcgttggcataggtgagcatcagatactcgccggtaatgccgcctgcttccagcgtggtcattccggcatagcgcccgacgccgtgctccagatggaccaccggctgaccaatatgcagttccgcgaggttacggatcagtgtatcggggttgatggtgcggcgagaatcctgacgacgacgggcaacgcgttcaccgagcagatcgctttcgcaaatcagcgccagattacgtaccgtatcgacaaaaccatgctctgcagcgccaatcatcagataacgcccacggtcgctggcttcatcaagacgcataatgcgttgcggagcaattttaattcgcgcgagcagttcacccagcgcttcacggcggccttcactttctaccgagaacaccaccggaccgtcgaaagactcgaggaacttacgcagcgcatccagcggcgctttttgttgtgcctgaacggccaggtctggcagtttctggaaacctaaattggcattcgcggcttttgtcggtaaatgttcagtttttagctgcactcggggccagtttttcagctctgagaagagctcgtccacccgcagccagagcgattgtggtggcaacagtgggcgcatcggatcgacgccgcgattctcaaaacgcgccagcgtgtcagcctggaaacgttcggcactgttttccagatcgccagtattcaccagcaaggtattggcagggaaataactgaacagcggcggcagtggttcgctgaagaacaatggctgccagtactcgatcccggcaggtaatgtgcctttactcacttgctggtaaatatgttccggatcgcgcttcacttcgaaggtatcgcgccactggctgcggaacagttcaatcgccgctttatcggtcggaaattcgtgcgcaggcagcaggttgatcgcttctacttcctccagcgtgcgctgactgtcgacgtcaaacacccgcagactgtcgatttcatcatcaaagaaatcaagacgataaggcaactcactccccatcgggaagagatccagcaacgcgnnnnncgtggcgtattcgccgtgctccatcacctggtcaacatggcgataaccggcgctatccagttgggttcgtaatgcatctcgtgacaggcgctgacctttttccatcaccagcgcatgaccgtggagaaaactgtgcgggcaaacgcgctgcataagtgtattcaccggaacaatcagtacgccacgctgcattgtcggtagctggtaaagggtggaaaggcgcgaggagataatgtcctgatgaggcgaaaaactgtcntaagggagggtttcccagtctgccagattcatcaccatctggtcggtaaactggctaatttcatcatgcaaacgcagggcattttgcatatctggcgcaataagcaccaccggtccggcgtgacgttcggcaatttccgctaccagcgtcgcgcaggcagcgccggttaactcgcccagcagacgctgctcacccgctttgacgggcagcgtataacgatattgttcaggcataacggttgtcanattctcgttaggatatgcctcaacatatgggggcatatctctgataagcaatgctgttcattatccgtaatcgacatggtttagcaaattgaatcgccccggctggggcgatggcttancgggagtaactgacggcagcgggcagtgaaggcggggagaacaacagatcgctgaatgctcgctgtgaaagttttcttaccagcaagcccgcaacagtacagatgaacaaactaacaaaggggtaaaccagcaggagtgtcagttcgacttgcggcgaccagcgtgctgcgttcatttgcgcaagcagagttaagctgaatatctctaccagaattctatgggtagtgtagatagcaatagtgttggagccaatcacattcagcagactggtggaacgcatgccaaaacgttgttcatactgataaaacaacttcatgatcaccacaatcgacaccagcgacatcagcagcgagatagtaaacaaccaggcaccgaccgccagagcagccagcaaagaagccatcagcagatggcggcgcaacggcacctctttaacacaggtcattattgttgcgccaaaccatgcaccaaggctgtaataaggcaaattgcggatcacnctgttcattccccaccacggcgtgggaacgaaattaaccgccacactcagcagnacaaacaaggcgaatagtggcagcgncagacggctaannattttacataccacgaaatagacaattaacgcatacagataccacaagctggtgctggcggtgatcatcccgtgcaggaactcaccggtggaatcggcatacgcggcattggaggcattgcttaaatcgcgctcaggtgccagccactggttcagcgcacttaacgccagccactgcaccacgccccaaagcgccagcacccagaagatgttccagatccgtttatcgagacaatttccccacggtacgctgtcgatatagcggcgaatcaaatagccggatataaagaaaaaaaccggcatacgaaagggtgcaaggtaaagattgaaatagatccagcatttgctcaggacttccgataacggatgctgaaaagtggtcatatgcggataaaaggtaatgaccgagtgataaatcaccaccagacaaatacataaccctttgatctggttaatccatagctctttttgtttcatcaggacaacacgctcttttttaatttacatgcggttgatcctgcgggttatgacccgaggtgtaatgggtatctgtctgtattggatgatttttcagattaagatcaggcggcaagattgatgataaaacatggcaatttagccgattgatttacgggggcttttcagattagccctgacgatcacttacagttcagacgtttacccatcttgctttcgcttatatactcgtgtctttgctacagcaaccagacggatttcatgtaccaacctgtcgctctatttattggcctgcgttacatgcgtgggcgtgcagcggatcgcttcggtcgtttcgtctcctggctttctaccatcggcattaccctcggggtgatggcgctggtcacagtattgtcagtgatgaacggctttgagcgcgagctgcaaaacaacatccttggcctgatgccacaggcaattctctcttctgagcatggctctcttaacccgcagcaactcccggaaacggcagtcaaactggacggcgttaatcgcgtcgcacctattactaccggtgatgtggtactgcaaagnncgcgcagcgtggcggtcggggtgatgctgggtatcgatccggcgcaaaaagatccactaacgccgtatctggtcaatgtgaaacaaactgacctcgagccggggaaatataatgtcatcctcggcgaacaacttgcctcacagctaggcgttaatcgcggtgatcaaatccgcgtgatggtgccatctgccagccagttcacgccgatggggcgtattccaagtcagcgcctgttcaatgtgattggtacttttgccgctaacagtgaagtcgatggctatgaaatgctggtgaatattgaggatgcctcgcgtctgatgcgttatccggcaggcaatattaccggctggcgtttgtggctggatgagccgctgaaagttgactctttaagtcagcaaaaactgcctgaaggcagcaaatggcaggactggcgtgatcgtaaaggcgagctgttccaggccgtacgcatggaaaaaaatatgatgggcttactgctgagcctgattgtcgccgttgnggcgtttaacattattacctcgctggggctgatggtgatggagaagcagggcgaagtagcgatcctgcaaacgcaaggcttaactccgcgacaaatcatgatggtctttatggtgcaaggggccagcgccgggattatcggtgcgatcctcggagcggcgcttggcgcactgcttgccagccagttaaataatctgatgccgataatcggcgtcctgcttgatggcgcggcgctgccggtggctatcgaacctttacaggtcattgttattgcgctggtggcgatggctatcgcgctgctgtctacgctttacccttcatggcgcgctgccgccacacaacccgctgaggctttacgttatgaataagatcctgttgcaatgcgacaacctgtgcaaacgctatcaggaaggcagtgtgcaaaccgatgtactgcacaatgtcagtttcagcgtgggcgaaggtgaaatgatggcgatcgtcggtagctctggttccggtaaaagtaccttgctgcacctgctgggcgggctggatacaccaacctccggcgatgtgatctttaacggtcaaccgatgagcaaactgtcttcggcggcgaaagcagaactgcgcaaccagaagctgggctttatttatcagtttcaccacctgctgccggattttactgccctggaaaacgtggctatgccgctgctgattggcaagaaaaagcccgctgaaatcaacagccgtgcacttgagatgttaaaagcggtggggctggagcatcgtgcgaatcaccgcccatctgaactttctggcggcgaacgccagcgtgtggcgattgcccgtgcgctggtcaataacccgtggctggtactggcggatgaacctaccggtaacctcgatgcgcgtaacgccgacagcatcttccagttgcttggggaattgaatcgcttgcagggcaccgccttcctggtggttactcacgacctgcaactggcgaaacgtatgagccgccaactggagatgcgtgatggtcgtctgacggcggaactgagcctgatgggggcggagtaatggcgatgcctttatcgttattgattggcctgcgttttagccgcggacggcgacgcggcggcatggtgtcgctgatttccgtcatttctaccattggcattgcccttggcgtggcggtattgatcgtcggcttaagcgcgatgaacggctttgaacgcgaactgaataaccgcattctggcggtggtgccgcatggcgaaatagaggcggtggatcaaccgtggactaactggcaggaagcactggataacgtgcaaaaagtgccaggtattgccgccgctgcgccgtatatcaatttcaccgggctggtggaaagtggagcgaatctgcgcgcaatccaggtgaagggcgttaacccgcaacaggaacagcgtctgagcgcattaccctcgtttgttcagggggatgcctggcgcaattttaaagcgggcgaacagcaaattatcatcggcaaaggcgtggcggatgcgctgaaagtgaagcagggcgattgggtgtcgattatgatccccaactcgaatcctgagcataaactgatgcagccaaaacgtgtgcgtttgcacgttgccggtattttgcagttgagtggtcaactcgatcacagttttgccatgatcccgctggcggatgcccaacaatatcttgatatgggttccagcgtgtcaggtattgcccttaaaatgacggatgttttcaacgccaataagctggtacgcgatgcgggtgaagtgaccaacagctatgtttatattaaaagctggattggtacttacggctatatgtatcgcgatatccagatgatccgcgccattatgtatctggcgatggtactggtgattggcgtggcctgtttcaacatcgtctccaccttagtgatggcggtgaaagacaagagtggcgatatcgcagtattaagaacgctgggggcgaaagatggtttaattcgcgccatctttgtctggtatggattgctggcagggctattcggtagcctgtgtggtgtgattatcggcgtagttgtttcactgcaacttaccccgattattgagcggattgaaaagctgatcggtcatcagttcctctccagcgatatctattttattgacttcctgccatcggaattgcactggctggacgtcttctacgtactggtcacagcattgttgctgagtcttttggcaagttggtatccggcgnggcgcnncagtaatattgaccctgcgcgagtccttagcggccagtaaaggcagtacattaaaacaaggagcggcaatgtattacgggtttgatattggtggaacaaaaattgcgcttggcgtgtttgatagcggtcggcagttgcagtgggaaaagcgggtgccgacaccgcgtgacagctatgacgcatttttagatgcagtgtgcgagctggtagccgaagctgatcaacgttttggctgtaaaggctctgtcggcatcggtattccgggaatgccggaaacagaagatggtacgctgtatgccgccaatgtccctgctgccagcggtaaaccgctgcgtgccgacctgagcgcacgtcttgatctcgatgtacgccttgataacgatgccaactgttttgccctttcagaagcctgggatgacgaatttacgcaatatccgttggtgatggggttgattctcggcaccggcgttggcggcgggctgattttcaacggcaaaccgattaccgggaaaagctacattaccggcgagtttggccatatgcgtctgccggttgatgcgttaaccatgatggggctggatttcccgttacgccgctgcggctgtggtcagcatggctgcattgaaaattatctgtctggtcgcggttttgcgtggctgtatcaacactattatcatcaaccgttgcaggctcccgaaattattgcgctttatgatcaaggcgatgagcaggcaagggcgcacgttgagcgttatctggatttattagcggtttgtctgggaaatatcctgaccattgttgaccctgacctggtcgtcattggtggtggcttatcgaatttcccggcaatcacaacgcaactggcggacaggctgcctcgtcatctcttacctgtagctcgtgttccgcgcattgaacgcgcgcgccacggtgatgcgggaggaatgcgtggtgcggccttcctacatctaaccgattaaacaacagaggttgctatgctgtcgcgtcggggtcatcggttaagtcgttttcgtaaaaataaacgccgcctgcgcgagcgtttgcgtcagcgtatttttttcagagataaagtggtgccggaagcaatggaaaaaccaagagtactcgtactgacaggggcaggaatttctgcggaatcaggtattcgtacctttcgcgccgcagatggcctgtgggaagaacatcgggttgaagatgtggcaacgccggaaggtttcgatcgcgatcctgaactggtgcaagcgttttataacgcccgtcgtcgacagctgcagcagccagaaattcagcctaacgccgcgcatcttgcgctggctaaactgcaagatgctctcggcgatcgctttttgctggtgacgcagaatatagacaacctgcatgaacgcgcaggtaataccaatgtgattcatatgcatggggaactgctgaaagttcgttgttcacaaagtggtcaggttctcgactggaccggagacgttaccccagaagataaatgccattgctgccagttcccggcccccttgcgcccacacgtagtatggtttggcgaaatgccactcggcatggatgaaatttatatggcgttgtcgatggccgatattttcattgccattggtacttccgggcatgtttatccggcggctgggtttgttcacgaagcgaaactgcatggcgcgcacaccgtggagctgaatcttgaaccaagtcaggtcggtaatgaatttgccgagaaatattacggcccggcaagccaggtggtgccagaatttgttgaaaagttgctgaagggattataaagcaggaagcattgcctgatgcgctacgcttatcaggcctacaagcggaccacaataccgacgaaagagcgggataaaactttactgtcctgactcattagccacatccttgctaactaaaaaacgggcggtaataccaccgcccgcttgctgaattaacgtcctgctttcagcttctgataatactcttcataaatgctgctggctgcgccaacgtcattctgccattcgccatttttaatggtttcagcatccgggtagagcgtcttatcgttcgccacttctggacttaacagcttacgcgccgcaaggtttggcgttggataaccgatagtttcagcaacctgttttgccacatccgggcgcagcaggaagttgatcaatttcagcgcgccttctttgtttttggcatttgccgggatcgccaggctgtccatccagaatatgccgccttctttcggccacaccacgtcaataggcgtacccgcctggcgtgcaacgaaagcagaaccgttccagatcatgccgaggttaacttcgccttccatgtacgggttagccgggttatcggagttaaacgctgcgacgtttggcatcagttttttcagctcgttatatgcagcttcaatctctttcggatcggtggtgttaccggagtagcccagcttacgtagcgccatctggaacacttcacgggcatcgtcggtcagcagcaggctgcctttgtactcaggcttccacaaatcgncccagctggtgacagatttcggatccaccgcatcaccgttaacgccaatcgccgtcgcaccccagatatacggaatggagtaatcgttattcgggtcaaacggcttattgagcatgtctggatcgagattgctgaagttcgttaacttcgacttgtcgatcttctggatcatcccttctttacgcattttatcgacgtaataggttgaaggaaccaccaggtcataggcaccgtctttgtacgttttcagcttggcatacatggtttcgttcgactcgtaagtcgaatagataaccttaataccggtttctttggtgaactgttcaagcagtcctggcggcacgtactcggtccagttgtagaaatacagcgtgttgttgtcatcggcgtgagcggcgctcatgcccagtgccagagcacccgccgcgagcaggtggcgtgaccattttttcatttaacgtcccctgtgttacctttcgttttatcacgagcaataagctggctggcaataaccatcaccagcgacagcaccagtaatatggttgccagcgcgttaacttccggcgatacgccgactttgaccatcgaataaatttttaacggcagaatttcataactcggcccggtgacgaacgaagaaaccaccacatcgtccatcgacagggtaaagcttaacacccagccngccgccaccgctggcattgccagtggcagaatgatttttcgcagaatggtaaattcgctggcaccgagatctttcgccgcttccagcatccgcacgtcaaaacctttcaggcgcgaatacaccgtcaccaccacaaatggcaggcagaaggtgatatgcgagaacagcagcgaccagaagccaagctgaatacccagcagcataaacagcaccagcagcgaaatcgccatcacgatatctggtgacatcatcaccacaaacagcattccgctaacgaacggcttaccacgaaagcgataacggtacagcgcaactgccgtcagtgaaccgataagcgtagcaaacgtcgccgaaaacaccgccattgttagtgaatgctgcgctgcctgtaacaggctgtcgttgttcatcagcaggctataccatttggtggtaaaaccctgccagttgatgccaaagcgcgagnnnnnnnaggagttcacaatcaaaataatgattgggatatacaggtacgcgtagatagcggtcataaaaccgccgcgaagcagtcgaccgatcattcgagttccacctttttgttcagcagacgagaagcgcgccagtaaaccagcaacatcaggcccattacgatagtcagcgtaatgctggtggctgcaccaaacggccagtcacgaatattgaggaactgtaccttgatgacgttaccgatcagcaggtttttcgcaccgcccatcaggtcggacacatagaacaggcccatcgctggcagcatcaccagcagacatccggcaataatccccggcatcgtcagtggaataatgatgcggataaaagtctgtaacttgctggcaccgagatcgcgcgccgcctcaagcaacggcttatccagtttttcgatactggagtacagcggcatcaccataaacggtagcagaatgtaaaccagaccgataatcaccgcactgggcgtgaacatgatacgaattggtgtgtcgataacgcccagccagagcaaaaactcgttgagatagcctttggtgctgaggaaaattttcagcccgtagatgcgaatcagtgagttggtccagaagggaacaatcagcagaaacagcagcagcggacgcaccttgtgtggcagcttcgccagaaaccaggcaaacggatagcccagcaccaggcaggcgagggtggcgatcagcgccatattcagcgagtgcaatagcacttcaaaatagagcggatcgagcagacgtgtgtagttatccagcgtaaagaccattttgacaaaactggcgtcgtcgcgggtcaaaaagctggtgccaatgatcatcaggttgggcagaaagacaaacaacacaagccaaccgacaatagtgacaatcactacattctggaacttacttgtgttcttcatcagccagtacgacctcccagctttctacccaattaatggnnnnnnnntggtcgagagagtggtcaaagtcaggatcgtcttcattgaagaattcgctgaccatcaccatcttgccattttccagttcaacaaccgactccagcgtcatgcctttgtagttacgctcgcgaacgtaaccaatcagcccttcagcgtggttgtcgtcgttaatctcttcaacacgtaagtcttccgggcgcagcagaacatgcagtttttgccccggttcaacggcgaagttaacgtagatattacattcgcggccttcaacgttggcgcgtacgcgctgctcgtcgagacgttcgatgacagtggcgttaaacatattgatttcgccaatgaacccggcaacaaacaggtttttcggctcttcgtagatttcacgcggcgtgccgtcttgctcaatgcgaccatcgcgcatcaccacaatcctgtctgacatggtgagtgcttcttcctgatcgtgagtcacgaagacgaatgtaatgccaagcttacgctgtaacgctttcagctcgttctgcatttgcttacgcagtttgtaatccagcgctgagagcgactcatccagcaacaacagacgaggcttgttaaccaccgcgcgagcaatggcgacgcgttgctgttgaccaccagagagctgatgcggtttacgttgagcgaaggtttccagctgcaccatccgcagggcttccatcacgcggggcgtaatttcagcagcgggggttttttgcatgcgcaacccaaaggccacattttcgaacacggtcatgtgggggaaaagtgcgtagctttggaaaacagtgttcacatagcggttttccgccggaacgtgggtgatgtcctcgttatccaacatgatgcgtccggaatcaacagtttccagacctgcaatcaggcgaagaacggttgttttaccgcagccagaagggccaagcagcgtgaggaactcgccattgttgatagtcagatccagctggggaatgacctctttaccatcaaagcatttgcgaattcccgccaattgcaccagcggtgaaagcgaactcggttgtttattcaattttttactctgtcccatgtaaacgcaacggatggcttaccgatgcggggtttgtggttaaccaccttggtgactcttaatgagggcggtaattctacggcaaaccgcttgaatcgccaatctttgttgtgaattactggcttagctttatattcattaaggtaatgctgataaatattcccgcttgcaggggtaaaagtgacctgacgcaatatttgtcttttcttgcttcttaataatgttgtcacaaaaagtgagggtgactacatggataaactacttgagcgatttttgaactacgtgtctctggatacccaatcaaaagcaggggtgagacaggttcccagcacggaaggccaatggaagttattgcatctgctgaaagagcagctcgaagagatggggcttatcaatgtgaccttaagtgagaagggcactttgatggcgacgttaccggctaacgtccctggcgatatcccggcgattggctttatttctcatgtggatacctcaccggattgcagcggcaaaaatgtgaatccgcaaattgttgaaaactatcgcggtggcgatattgcgctgggtatcggcgatgaagttttatcaccggttatgttcccggtgctgcatcagctactgggtcagacgctgattaccaccgatggtaaaaccttgttaggtgccgatgacaaagcaggtattgcagaaatcatgaccgcgctggcggtattgcaacagaaaaacattccgcatggtgatattcgcgtcgcctttaccccggatgaagaagtgggcaaaggggcgaaacattttgatgttgatgccttcgatgcccgctgggcttacactgttgatggtggtggtgtaggcgaactggagtttgaaaacttcaacgccgcatcggtcaatatcaaaattgtcggtaacaatgttcatccgggcacggcgaaaggagtgatggtaaatgcgctgtcgctggcggcacgtattcatgcggaagttccggcggatgaaagcccggaaatgacagaaggctatgaaggtttctatcacctggcgagcatgaaaggcaccgttgaacgggccgatatgcactacatcatccgtgatttcgaccgtaaacagtttgaagcgcgtaaacgtaaaatgatggagatcgccaaaaaagtgggcaaagggttacatcctgattgctacattgaattggtgattgaagacagttactacaatatgcgcgagaaagtggttgagcatccgcatattctcgatatcgcccagcaggcgatgcgtgactgcgatattgaaccggaactgaaaccgatccgcggcggtaccgacggcgcgcagttgtcgtttatgggattaccgtgcccgaacctgttcactggcggttacaactatcatggtaagcatgagtttgtgactctggaaggtatggaaaaagcggtgcaggtgatcgtccgtattgccgagttaacggcgcaacggaagtaagcgaaaagggatgcggcatgtgatgccgcatccggcttaaatccaaacttacccttcgaagaaccaatacccgctattgaccagcgccgcgagcatcgcgaggaatgacggatcttccagcgcatcgccaaaattctccgcagtcagcgcaatgttgctggcgagtgcatccagtgccggacggtgcggggaatcgatcttctcaccattggtatacacgtcgtcgccaatgcgcaatacgcgcagaccacccaggcgcaccagcacatcaccttgtttcagcgcatcgtagatttcatctggctgataaggcggctccggcggcgcgatatccagttcatgacgtgactgggatataaactcgccaaaccattgcttaaagtgttccggctggttgatcaattcgagcatcatctcacgcagtttatccatctcttgcggcagaacgtccgcaggatgagcgcgaggtggaacatcaggatcgctgtagtagttgccgcccagttcgcgttgcagcacataatcggcaaatccgctaattaattcccgcgtatttggcgcgcgaaaacccacggaatagttcatcgcattttccagcgcgtagccttcatgcgggaatcctggcggaatataaagaatatcgccaggctccagctcttcatcgatgatggcttcgaacggatcgacctgtaacagatccggatgtgggcagtgctgtttcatttgcagcttctcgcccactcgccagcgacgacgtccggtaccctgaatgataaacacgtcgtactgatcgagatgcgggccgacgccgccgccaggtacagaaaaagagatcatcagatcatcaatacgccagtccggtagttcacggaacggtcgcatcagcgcggcggtcggctcatgccagtggttcactgcttgcactaacaatgaccagttagtttcaccgagatgatcgtagctttcgaacggaccgtggctgacctgccattttccatcctggtgactgaccagtcgactgtcgacttcgctttccatcgccagacccgccaactcgtctggagagatcgggtcaataaaattattaaagccgcgttttaacaccaccgggcgtttctgccagtgacgttcaagaaaatcgggccagttaagagtgagttggtattccatgttaagcatccacaggctggtatctgcaaccgattataacggatgcttaacgtaatgcgtgaagtatggacatattttatcaattagtgttttttgccgtttcataatgtttcagattgttcattatgtttttgattataaacagatttgtgattttccttgttccagcttgtttcacgttgtagccctttgtgcaacgatcggtgtagttaatggtgtagttaattgtgatgaccggaatcaaaattatgagcagagcacttaacaaactgagcgatacacagctgaggaaaatcaacggcacacccgcccaaaaaacagcctttcttaatgacggtggaaacctgagcgtcaggcattcaaccagtggccttttaacctggtatttcacttacagggccggaacgggaaggggggcaccaccggaacgcattaagctgggaaattatcctgatctgagcctgaaatcagccagggaaaaagccgcccagtgtcgcgcatggctggcagaggggaaaaatccacgtcatgagcttaattacaccgtacaggaagcgttaaagccggtaacggttggcgatgcgctcacctactggcttgagtcgtacgcaaaggaaaaccgcgtggattatgccgccctgaaaaagcgccttaataatcacgtaatacagcacattggtgctatgccgctggataaatgcgagctacggcactggctggcctgttttgaccaggtggcaaagcgaacgcctgttactgccggattcttgctacagacgtgcaaacaggcgcttaagttctgccggaggcggcgctatgcaatcagcaacgttcttgatgatatgagtgtggcggacgttgggaaaaaaccggatataagcgagcgtgtcttaagcaccaaagaactgggcgaattattgcaggcactggacaaaaaaatattctccccctactacatcgcgttaatccgcctcctgattgtgttcggatgccggacggtagaactgaggttatcggagatcagcgagtgggattttaccgaaatgctctggaccgttccgaaggagcacagcaaaacgaaggtagccatattccggcctataccggaagcaatactgccgttcatcacgcagctggtggagcagaacaggcacacgggcttattgctgggggaagtgaaacaggaggccagcgtatcgcagtatggaagattagcgcacaggaggcttaatcaccctcactggtcactgcatgacatccggcgcacctttacaaccatgctgaacgatttaggcgttgatccgcatgtcgtggagcagcttacaggccaccagatgccaggaatgcagcgagtttataatcattcccgttatctggatgcgaaacgcaatgcgctggatatgtggacggagcggttagggatactggcgggaacacatgaaaacgtaaccacgctaccagtagccagaagaaaataatttttttcgtgttttttcagtatgcgcatactggatatgcgaacagatacaacgtgcaacaatgagcaacaatgtggaacaactacgaacaagaggcgaaaaagcgtacggatttataagtagctgatttttaatgtgttactggttttttatacactagcgaatcactctttaaagagcgagaaaaaaggcatggaacaatattttatgcctttgtattaacatgaatttaaaagattttattcttactttttcattttctgtaaatcatacatcctcagtatttgccattcatcactctagcgggaacaatacgacacaataagacacctgatgactctttaagaaacgaaagggggcaatagtgttaagcactgatcggtttatacgtgaaaaagaatgcgaaaaactaaccggccttagccgtacgtgtcgctaccgcctggaaaaggccggacaattcccatcacgtcgtaaacttggcggtcgttccgttggctggtctttatccgaggttctggcctggaaggatagctgcaaggcagttcattaatcacgctggcggcacacagccgccacacatcaatcatctgaacacagagctataaccatgaagattgaatatacgccagaacgtgggcggggattcgttcgccctggtgagactggaaaaccacaaaattggggtttttcaggcataaaaaaagcggccccgaaatggagncgcctttctgaacagataacccgctgcgccttatgtgtatatgatcccaaacataagcacggggatgatagccgctatcaggctggtgggcaatgctatcagtctggttcagttcgttgccatacctgcaatgggcgcgtttccctgtactctttaaggaattgctcaagggcaaaagcacatggcgcgaatctttctgattcatgctctatctttctgcgccgtcttttccgtgccggtgataatgttttggtcaattctttatcggtcattgtgttgtcctgcatagcaatgcgccgtaatacctcacaccacggcgctgatagtttttatcctttgggttctatgccgcggctgtaattctttgcggagaacgcgtttaatccaagtggctaaagatgtgtcgccatcggccttagctgcttcttctagctgcgctctgaagtcttccggtaatcgcatttggtatggaggcgaacgtttttctaatggtgttgacatggtaattaccctttattactatacctacatggtaattaccattgtacttgccattacacaaaaatcaacgccccgcagtgctgggaacacatacggggcgtctaaccaacaacgtaaactaggagccgttatggttgccgtaaatcatataccacaccttgtacacacacaaacggcctttgtgtggcgttttctggcactgagtgccggagaatctcaaatcatccacgtaaccgcctggacggaacgcgaagcgcgtaaccgttgcccgtccggttgtgttgctgtatttgccgcccgtattcgtcaggaggtgcgccatgattaatctgtcacttactgaccttaaccgcattcagtttcgtgagaaattcacagggcagctactggtcaatgtggataaaggtcgcgtggtgtgtaattaccacttaccagatgaagcaattgtcgccacaagggaatcattacaggaaatcacaaaacgtgccggaatgattaacacgaatattcaggggatgctttatgcacaataaaaccacaccggacgcagccgccgaagccatcaaaacgctgatgcacgcgctgattgatatttctgttatcgcggacagggcacataagcacgccaccagcgaaacagaatatgccggtgctttcgttcctcactcactggctgtcatgcaatttagtgctgatacggcgctgaatgaggccaaagctatcctgattgctgattgtgaaaatggggggggttatgcgtgatgatcgttttaattccctgaaacaggaattttccggcgttcctgatgatgcggctgatgcgctttcgtcaatgccagaacttattagagcggcttttttcttactttccacgagagaatataaatcaacggggcttgatgtactgaatatcgccgccgattatgcggaatatgtggcagaggcgcgttatagaagaaaatttcctgaggatgtaagccatgcgtgatatttaccaccaaacaatagaccgcgcatttcttgcactttctcacagtgaaaacatgatggaaatattgcgcatatggcttgaaacacttggcgacaatgaacgcgacaaacaaaaatcaagaattgccacggcattaataacgcttcttgagcctgtaataatggaactgcaagaaatagatctattgcacgacagatataaagaacagcacaccggagaataaaaataatgaaacttaaatattctggcttaactgccagtggcaacactcaccctaaatttacgnncggtgatatttaccgcgaccagtacggcggcacggtaatgattaagggcgtggaagaacggcgcgtaacctaccgccgtgaaggttacgaatatgattgcgtgatgcctgtttatcagttccggcgtgatttttctctggtacagaccgcgccgcataacgtgcccaccagcaacgccagggcacgggcaaacatccagaagctgaaaaccatggttaacggattcaggggcaagaaatgaaaagcgcaccgaacttaaaaaaacagccttacgacaagatgaccgaagtcattatttttgcgggtagtgatgcctgggcacatgcgaaacagtggcaggaacaggacgggcgactggctggcgataatgtgcctcccgttgtgctggctgatgatcaactggatgaactggcagacctgagaatcatcgacgaggggcgctattgtgtccggctgtacaaggcaggccacatcaggccatcaaatattaatgccattgcgcacaagctggcggcggcgggtgtaactgatgcgaattattaccccgaagggatgcacagccatatgcgggagaactggcgcgaatacctggaacgggtgcgcgggaaagagccggcggaagaaaaaaaccaccagcgaaaaaccacgctaccgatgagcgttggatctaccggatacgacacgcaactggattacgtggttaaggggattattccggcggtatcgctatgcagcatatacggggctagcgggtcctataaatcattccttgccggatcgtgggcgtgccatgttgccactggtcgccagtggggaggccgcagggttgcacatggtgcggttctctatgtggttggtgaaggcggtataggtgttccgcgtcgtgtaaaagcctgggaggttgtgcacgatgagcaggtgaaaaatctgtatctggtaaaccgccccatctttccggctgccccgcttgatgttgatgaaatggttatcgctgcccgtcaggtggagcgggaaacgggtaaacctgtacgcatgattattctggatacgctggcgcgttgctttggtgggaatgatgaaaatgattcccgtgatatgggggcgtttatccgtggttgtgacgaactgaaacgacgcacaggggccacggtgctggtggttcaccattccggcaaggatgagacgaaaggcgcgcgcggttccagtgcatttcgtgcttcgctggatgctgaataccggatacgcagggaggacgcaggaagcgaagcgctggttatctcatgcaccaaaatgaaggacgcggaggaactcaaagaagccgcatatgacttacgcgtggtggagctttttaccgacgctgacggtgaattaatcacgtcgctggtggtggtggatgatccgcgccctcctgttgaactggagcgcatcgaggaggcagggaacaagacggaaaaccataccgcgctatgggggtgcatccgttcacgcacacagaacggcgacaagtgcacgatcccgctgttacgtgatgacatgaaaaagctggggtatgaaatgaaaaacttccggcgctggctgtacaagctggaaaaagatggggttattcgtatcgatggggatgatgtagcgccgctataaaagtgaggagcaaaagcgagggggatagaaagagggccaaaattagcccgctctccctcacttttcgacctgtatacatcctcaaaagtgaggggtaaaaaaatacttatgaaacacacacatagaaaaaccgaaaatcccaactgcgacgaagtgagacgcttgaaaaagtgaggcgaaaaagtgagaggttgtgagaaatgacccaaaaacgcagagacagaacagagccaaaatataaagcgttagacatgactgagcacaccttaaagnntgcaatcagaacgatagaccgccacacgcggggaaggatacgcgaaggaacatcccgacctgataagcgcattcatgaccacggcggcnnnnaactnnnnnacgcttacagaacgggagattgccgaagcggaacaggtaacaaccnnnnacgnnnnnnnnnnnnnnnnnnnnnnnnnnnnnnnnnnnnnnnnnnnnnnnnnnnnnnnnnnnnnnnnccgcaggtaaaacagaccagcaagggcacaccgatnnnnnnnnnnnnnnnnnnnnnnnnnnnnnnnnnnnnnnnnnnncaggacggacaggcgacgttatggttatcggtcatcgcatttggcaaacaggccgacttcctggctaaacatcaaaaaggcgatgttgccagcgtatccggcacgatgcaggtaagccagtggaccggacagaacggagaaacgcggcagggctggcaggttatcgcagacagcgtaatcagtgcccgcgnggcacgtccaggcgggaacagacgcaaaaccacaggcacacagggtaatcagccaccagcgggaggcgatgacccttacggtgatgatatttcgttctgagggggtgacgatggtacatgaccgcatagcggaggaactggaggcgaaaggcttttaccggagggcggcggcgcgatggggtgaagtcatgcagctggtggagacagacaaggaacggcatcacatcacgatgcgacggctggaatgttcaaggaaggcacagagggcaccggagccgccggataatttcggagacctgaaaaaggcagtcgatcgcacttatgccgaaatgggtatagatggtgctggtgatgaaatatggcgcaattaccaggacagctaatcaaacagccggagaaatccggctttttttgcaccagttgaaacggtatggcgcattaccgggttttcgtcacggtcaggcatagttactatctgaaacaaacagacacaacagaggaaaaaaacaatgccgatgaaatttgatgagatattaaaacagcgtgataaataccatgctgacaacatggagacgatgagcatcaatgattaccgcgcattcctggagacgggcgcactgattgaaaaggatcagcatggttttgtgagatgtgctctatccggtgaaatgctggcggtaaatcctgaacagatagatgcattgatagaatttctgaaagagatcagagactgagccagcacacagcacacatagccggagcaatccggctttnnnncncccaaaaaaagcccgataaggtcagagggttcttatcgggcttttgcatatgaggtttttggatgcactggcgttcgtgatcgggataatcatttcataatttgcaacataactcaatatcattgcataaaatgcaattctgattataatcaggactggataaacgtccagttatgatttttttagtcgaagaggaatttcttactatggctgaagagaaaaaaggcggtgtttcggtgtacataagccccgaaatcgtggaggtgctcaagcagcgccacaaaaaaaactatgaagctggcgttgcggctggactggatccgctgatgacgccggagccgtcgataggttcacttgtacgctcttatttacttgcggcgcttgggatgcataaaaattatgggggtgaataatggcaggcaaagcaacggcacttaacactaaccagcttttcatgtacctgaatcgcggggatattgcggattttaaattcagccctctgtttaccacgctgtttttcccgaacgtggcgacattcagcacgcaaaacatcatgctggataccctggacattgaagaagtcaccatgtcggcgttttgttcgcctatggtgggtagccaggttcagcgcgataaagggtacgaaaccagcacaatcaaacctggctacatgaagccaaagcacgaaatcgatccaacgaaaaccatcatgcgcatggctggagaagatccggcacagcttaacgaccctacctatcgccgtatgcgcctgattactggcaacatgcgccgccagataaacgccattaaggcacgcgtggaatggctggcggtgaatgcggtaacgaccggaaaaaacatcattgagggcgaaggcatagaacgctatgaaatcgactggaaaataccggaaaactgcatcatagagcaggccaagggtaaaaaatggtccgagcaggataaagacatgcacgacccaatctatgacatcgagctttatgctgatcaggctggttgccccgcaaacgtcatgattatgggcgctgaggtatggcgcacattacgcagctttnnaaaattccgtgagctgtacgatctttcccgtggttcagaatccgccgccgaactggcctgtaaaaacctgggcgaagtggtgagctttaaaggctatcttggtgatctggcccttatcgtctattccggcaaatacactgacagcgatggtaccgaaaaatatttccttgagcctgatttgctggtcctgggtaacaccaacaataaagggctggtggcctatggtgcgataatggatcaggaagcggtaagaacgggcgcaacacaaaacatgttttacccgaaaaactggattgaggacggcgatccggcgattgagtacgtgcagacacacagtgcaccgcagccggtaccggcagatattcgcaaatttgttaccgtcaaaattggttaacggggggattctatggacactccatacattgagttatttgcaggcagtcagcaggtatccacgacgttggtacattttgccgctgatgctggcgttattcaggaatttaccccgctgatgctggcagacaatggcgagtttaagccgtgggatggtcaggaatctggcaaggctgtttatctgacctcgtaccctgtggacacgtcaaagcagaaatcagcacagtgttacaagacggggatattcaatattgccgccgttaactggcctgagagcgtcgacaccgatgcgaaaaaatgcgccgcctttgcgggttcyggcgtatccgttcagccgctggcccgataagcagggggaacgatggcaacgaatgaaagcatcatgacgctaccgctggcgagtanatttaaagtcgaagcgcgggcaatggctgacagaggtttatcaacctatgaggccgtatatcaactaaacaaactggaagagcaggacaagccgcgcgctgatgcgattatggcgcttcatgagcataaagactatcagccgctgttgcgtgcaatggcaaacgtgccttgtatcgatcttggtacggctaaaagcatccttagcatgaccatagagcaggaacgtccgaaggttgcgccggaacttaccgcagcctttgaaaactttatggacatgcacagcccgcaagccgtatcagctggcatggcatacgatggcagaaaccagggcgatgacggcgacatcgatcgcatactgaaaaccatctgagacaaggccggagaaatccnnnttttttacgggtccttcctggaattatggcccgttacggggcggcgacctcgcggattttcgctatttatgagccttttcagggtggtggtggtggttttgttgtttgatctatctttatgaatgaaaagggaaagatgcaagcaatacaccaacctgaagcagtaattaagttggtgtattaatgaaatctcatctgatgaacaaaaaaaacatggcgaaaagctgccgtgtaagtgcgacagcgttcgacaagtggggagtaactcccgttgagcgtaaaggccgtgaggcgttttatgatgttgccagcgtgatagaaaatagggttaacaatgcaattagccagcttataaacgacaaaggcgagattgacgatgatgaacttttacgagtcaggatcagattactgacagcacaggcagaggcgcaggaacttaaaaacgatcgcgatcgcggtgacgtgattgatactgagttttgcctgtacgcgctttcaaagctggcgagtcagatttcatcaatcatggacagcctcccgcttactatgcaaaggagcttcccacagattacccccgccatgctggacaggcttaaaagggaagtggttaaagcctgtaatgccagtgccagagttgccgacaacctcccacagatactggctgattacttgaaagaaacaaccggaaacgtaccggaaaagttgctacagaagaaaggcgagtaacagacgcgcaattattgaacaaaaatgagaaaggatctgataatggcattttctggctaaaatgcctcgtgtcagatcctttctttttttaatattttcattgttaaacagtctgttacagagaagaagatcggatctgacttttgccggaaaattctcataaacagataaaaaccgcgaggtcgccgccccgtaacgggccataattccaggaaggacccgacgacaccagactatcagagcgatgggggcacaatgacagaagccgaactactgggattaatccgccgcgtcgccggaatcagccagcagcatgacgaacaggccacacagccggacagcgtgaccgctgaaaattatgtgcgtgttgtagcggaagtgatgcgccgtgatggtatagaacttaatggcgttgatatgcgcaacatacggaaccgcgttcttgaaatgctggcctacaatcgccgcgttgaactgtatcgggagaaagaaaaaataacgtaccactggaagaagccggaacnnntgcggcggtaacttgctgatattcccgataacgcaaaattgcgctggctacatccctcacatctgaggactgttaatcagaaggccggaatatattcacaaactacgaaattttcgtagtttaattaatggtcagattaatcgctaacccgctgatattttcggaaacctcaatttgaggaagtcggaagcgtcacccttcatattctgaatggtcatnnnnnnnnnnnngaccacgcagaccatcaaggcaaccacaacgaacatcgttacggttggagcttttaccccactgggggaaaggtattacgataatcataacacctaccgaacaggtaaaacccaccagcctgattaacagttaaccggaaaaaaaatccggtagccccgttatggggannnnnnnnnnnnnnnnnnnnnnnnnnnnnnnnnnnnnnnnnnnnnnnnnnnnnnnnnnnnnnnnnnnnnnnnnnnnnnnnnnnnnnnnnnnnnnnnnnnnnnnnnnnnnnnnnnnnnnnnnnnnnnnnnnnnnnnnnnnnnnnnnnnnnnnnnnnnnnnnnnnnnnnnnnnnnnnnnnnnnnnnnnnnnnnnnnnnnnnnnnnnnnnnnnnnnnnnnnnnnnnnnnnnnnnnnnnnnnnnnnnnnnnnnnnnnnnnnnnnnnnnnnnnnnnnnnnnnnnnnnnnnnnnnnnnnnnnnnnnnnnnnnnnnnnnnnnnnnnnnnnnnnnnnnnnnnnnnnnnnnnnnnnnnnnnnnnnnnnnnnnnnnnnnnnnnnnnnnnnnnnnnnnnnnnnnnnnnnnnnnnnnnnnnnnnnnnnnnnnnnnnnnnnnnnnnnnnnnnnnnnnnnnnnnnnnnnnnnnnnnnnnnnnnnnnnnnnnnnnnnnnnnnnnnnnnnnnnnnnnnnnnnnnnnnnnnnnnnnnnnnnnnnnnnnnnnnnnnnnnnnnnnnnnnnnnnnnnnnnnnnnnnnnnnnnnnnnnnnnnnnnnnnnnnnnnnnnnnnnnnnnnnnnnnnnnnnnnnnnnnnnnnnnnnnnnnnnnnnnnnnnnnnnnnnnnnnnnnnnnnnnnnnnnnnnnnnnnnnnnnnnnnnnnnnnnnnnnnnnnnnnnnnnnnnnnnnnnnnnnnnnnnnnnnnnnnnnnnnnnnnnnnnnnnnnnnnnnnnnnnnnnnnnnnnnnnnnnnnnnnnnnnnnnnnnnnnnnnnnnnnnnnnnnnnnnnnnnnnnnnnnnnnnnnnnnnnnnnnnnnnnnnnnnnnnnnnnnnnnnnnnnnnnnnnnnnnnnnnnnnnnnnnnnnnnnnnnnnnnnnnnnnnnnnnnnnnnnnnnnnnnnnnnnnnnnnnnnnnnnnnnnnnnnnnnnnnnnnnnnnnnnnnnnnnnnnnnnnnnnnnnnnnnnnnnnnnnnnnnnnnnnnnnnnnnnnnnnnnnnnnnnnnnnnnnnnnnnnnnnnnnnnnnnnnnnnnnnnnnnnnnnnnnnnnnnnnnnnnnnnnnnnnnnnnnnnnnnnnnnnnnnnnnnnnnnnnnnnnnnnnnnnnnnnnnnnnnnnnnnnnnnnnnnnnnnnnnnnnnnnnnnnnnnnnnnnnnnnnnnnnnnnnnnnnnnnnnnnnnnnnnnnnnnnnnnnnnnnnnnnnnnnnnnnnnnnnnnntcgacattaacgcccctcatgaattggtgcgcttccccctggaaagattacccgcctgtatatttcttgtgtctatttgttccacgttgtttcatacagtgcaccgaacggtgtagttaatggtgtagtcaatttgctgtttttagcactttttgcagtgtgggttgtttaattaaatcaatgggttgccttgctgtggtgataaaaggacatatttattcatctttcggcgtagaatgctggcgaccaaaaatcacctccatccgcgcaccgccaagcatgctctctccggcgacgattttaccctcatattgctcggtgatttcgcgggctaccgccagccccacaccttgcccagggcgtaaagtatcaacccgttgaccacggtcgaaaatgacctctcgcttgcttaatggaataccggggccatcatcctcgaccacaatatagagatgctcgtcggtttgccttgcagaaatttcgacaaactcgaggcaatatttacaggcattatccagtacattgcccatcacctcgacaaaatcgttctgctcaccgacaaagctgatctctggcgaaatatcgagagagatattgacccctttgcgttgatacactttgttcagcgccgaggtgagattgtccagcagtggggcgaccggatgcagctcgcggctgagcaatgtcccgccgcgcatactggcacgatgcaggtagtagccaatttgctgtgaaatgcggctgatttgctccagcattaccggttcagcatcactgacgctcatcttttcactacgtagagaacgcagcgtactttgcagcaccgccagtggcgttttcagactatgggtcaggtcggtgagcgttgtacgatatttgtcgtaacgttcgcgttcactttttaacaatcggttcaggtttcgtaccagactggtcagttctcgcgttgtggctggattgagcaattcgcggttatgttcttccagttcgcggacttcttttgccagggcttcgatggggcgtaaactccaccaggcggcgacccacagcagcgggatcactaacagcagattggctgagagcacatagataaaccagctccagaccatataggaactttttagctccaccggaatggtatccaccaccacaatggttaactttggcatccgcgatgttgccgggtagacgtttaccgccaccgagtgggtcatctccgcgtcgtcatcatcttcccgcacttcctgcaactgttgctgtatcgaatgatctccactcagcaagaggctggtatcgttaacatccgcttcaatttcatgaaaaccattcgatttcagccagtcaggctggatcatcttcatcagccagggcacgtcacgttgcgcccataaaagctgcccgttctcatcataaattagcgtcatggtggggctttgcttgtcgatattttcgggtaactcgacatgcaacttattgttttcccacttcgcaagggtatagaacagattgctctcgccacgtaacagccgaaacgtagttttatcgaaactgacgctataaccgatcagcgcgaccattccgtaggcaagcgaaagcaccagtactaccgctgccgttgccaacagaaaacgtacccgcagcgagagcgggaaaaaaagacgcagtaattttttcatcagcgcaattcgaacaaatagccctggccgcgaacggtagtaatcacttcttgcggatattgtgcctgaatttttttgcgcagacgtcccatcagtacatcaatggtatggctttcccgcagctccgcatccggatagagttgtagcattaacgaatctttgctgaccactttgccattattgcgtatcaacgtttccataatggtgtattcgaacgcggtcagtttgatcacttcgtcattaatagataattcacggcgagagagatcaacctgaaacggggggagcgaaatgacctgtgaagccaggccgctattacgccgcattaatgcctgcattcgcgccatcacctcttcaatatgaaacggtttagtcacgtaatcatcagcaccggcacttaatacttcgactttgtcctgccagctttcacgggcggttaataccagaatcggcagtgaaacatcattgctacgccagcggcaaatcagtgacagaccgtcctcgtctggcaatccgagatcgacaatcgcaatatccggtaaatgttcattgagataataatcggcttctttggcatcttctgcatcatcgacctgatgaccagcatcctgaatctgaactttaaggtggtgacgtaacaacgcattgtcttcaacaaccagtacgcgcatttttatttctccctgtcttaattattaaaatagtgtaacgcgattatgtggttatgggggtaaacattaaataaaccagcgggggaggggaggtaaagtgaaaaaataaaaagcggataatcttaataagcaggccggacagcatcgccatccggcactggtacgagtttatttcagctcatcaaccatggtgatggcgcgaccaatgtagttagccggcgtcatcgctttcaggcgggctttctcttcttctggcaacgccagaccgtcgataaactgcttcatgccttcggcgtcaacgcgcttaccgcgagtcagctctttcagcttctcgtacggtttttcgatgccatagcgacgcataactgtctggattggttctgccagcacttcccagttgtgatccagctcatccagcagatggtcacggttcacttccagtttgctcacgcctttcagggtggattgatacgcaatcagcgcataaccgatacccacgccgaggttacgcagcacggtggagtcggtcaggtcacgctgccagcgggaaaccggcagtttgcttgccagatgctgcaataccgcgttggaaaggcccagattcccttcggagttttcgaagtcgatcgggttaactttatgcggcatggtggaagaaccaatctcaccagcaatggttttctgtttgaagtggttaagggcgatataaccccagacgtcacggtcaaagtcgatcagaatggtgttgaagcgcgcaacgcaatcaaacagttcggcaatgtagtcgtgcggttcaatctgggtagtgtatgggttccattgaatacccagcgaggtgacgaactcttcgctgaactgatgccagtcaacttccgggtaagcggcgatgtgggcgttatagttaccgaccgcgccgttgattttgccgaggatctccacctggttaagctggcggtactggcgctccatacggtaggcgacgtttgccatctctttaccgatggttgacggcgtggctggctgaccgtgggtacgggacagcagcgggatatcgcgatactgaacggcgagatctttaatgccatcaattagttgacgccagtacggcaggatcacttcatcacgcgcggttttcagcattaatgcgtgggagaggttattgatatcttccgaagtacaggcaaagtggatgaattcagaaaccgcgtgcagttccgggatctccgccactttttctttcaggaaatactcaaccgctttaacgtcgtggttagtagtacgctcgatggttttgatgcgtgcggcatcttcttcgctgaaattggcgacaattgcatcaaggtaaccgattgcgtcggcagcaaaagcaggaacttccttgatcgctgcgtgcgcggccagtttttgcagccaacgtacttcaacttgtacacggaatttcagcaaaccatattcgctgaaaatcccgcgcagcgcgctgactttatcgccgtagcgtccatcgacaggggaaacggcggtcagtgaggataattccatagatcacaactccggggttaaatgagcaagaatttgttttgcctgagtggtcaggcgattacgagaaaacatcagttgcagacgtccgccgccgacctggtgccagagcacggcggcgcgaatgcctgccagcagggttgcgcgaactttcgcctgcacttgtgggctttgcagtacagcaggggaaccggtgacctgaatgcgcgggccaagcgggctgatcacatcaacatagatagcagccatcgcgctcatcagcgtttcggactgtaaatcgaagtgttcgagctggcgttgcaggccgttgatccggttgcccagagtgtcgagcgcacctttcgctgaggagagtttgcgcttaagcaccatcaggctgagtgtgtagcgggttaattcggcgtttaagccctggcgactgctggcattgagcacgccgagcagggtttccagcccgacgcgcaggttggcttcgctaccgccaaaaaccgccagcgtcgagctggggttcatatcaataatactgttgagtgagacgtgtagcgcatcggcatcacaatgcccctggtgagcgagttgttgcaccaggcgtgccgactgacaaataccggccagggcgagggtgatgtcatagtaattctttgccacgttcactgcttccttgttttaagtaaagataataatcagatcggcagcggcagacgctgctcaataataccgccaccgaggcacacttcaccgttatagaagacggcagactggcccggcgtcacggcggcaacgggctcatcgaaaatcacttcaatgcgatcatcgtccagcgccttgacggtgcaggggatatcggtctggcgatagcgggtttttaccgtgcaacgcatagtaccggtgaatggttcacgatcgacccagtgcagctgctgggcaatcagaccgacagacatcagacgcgggtgttcatggccctgcgcaacaatcagaatgttgttttcgacgtctttatcgaccacataccacggttcttcggtgccttctttggtgccaccgatacccagacctttgcgctgaccgagggtgtgatacatcagcccctgatgctcaccaatttcatcgccatcgactgtaatgattttgcccggttgcgccgggagataacggccaaggaactcgcggaatttacgttcgccaatgaagcaaatgccggtagagtcttttttcttcgcggtgaccagaccaagatcttcagcaatcttacgcacctgcggtttttccagttcgccgaccgggaacaggctttgcgcaatctgctcatggctgagcgtataaaggaagtagctctggtctttattgctgtccagaccacgcagcaggcggctcttgccatcgacatctgcccgacgaacgtaatgaccggtagcgatataatcggcacctaaatcttcggcggcaaattcgaggaaggctttaaatttgatctctttgttgcacagaatatccggattcggcgtgcgaccggctttatattcggcaaggaacagttcgaagacgttgtcccagtactcggcagcaaagttaacggtgtgcagttcaatgccgagcttgtcgcagacagcctgggcatcagccagatccgctgccgctgtgcaatattcctcaccgtcgtcttcttcccagttcttcataaacaggccttcgacctgatatccctgttgttgcaacagccaggcagaaacggaggaatcgacaccgccggacatgccgacgattactttttttgcggtttcagacattggatcactcacgacattgaacttcaaggcggcgtattctatcacgcagccttttagatgacaccctttgtaaaaggccagttaaaatcgccaatcatctccagcggatagcgttgcccgctttgataacaacggatactttccgccaccagcggcgaacgaagatttgacgcctgtaaaatttcttcggcgctgacccaacgacagcagtcgatatcgctgtcatgaggctgggtcgggcatatttgctcaagctcaatggcaaagaggaaacgcaaaaacggcgttttatctggcgcaatccactgatgcatacgaataaagtgttgcggctgcgcgctgatgccggtttcttcccacagctcacgggcggctgcttccactaaggtttcatcggcttccagatgcccggcaggttggttccataaggctttaccattaatcgtctcttcaacgactaaaaatttaccctctgcgtgcactacgcaagcaacggtaacgtgcggtttaaacattgtgcatccttattctgttgcttctcgccattcgccattggcaaggttatccaaagagtaatcacccatcgcatagcgaatcagtcgcagcgtggggaaaccaacatgggcggtcatgcggcgcacctggcgattacgtccttcatataaggtgatcttcagccagctggtgggaatacttttgcgttcacgaattggtgggttccgcggccataaccacgcgggttcgtcaaccagctccgcgcctgcgggcagggtagggccatcatttaaggttacgccattgcgcaaggcttcaagtgcgtcttgtgtgggaataccttccacctgcacataatagatttttccggtgcgtttgcccggctgggttaaacgcgcctgcaacgcgccgttattggtcagcaccagtaacccttcgctatcgcggtcaagacgacctgctgcataaacgccctgaaccgggatgaattcttttaatgttttgcgtccggcttcatcggtgaactgcggaagaacatcgtagggtttattgaacaggatcacacgcgtgggctggttttcaggtttacgcctggtagaacgttgtgagctgaatcgcttaacctggtgatttctaaaagaagttttttgcatggtattttcagagattatgaattgccgcattatagcctaataacgcgcatctttcatgacggcaaacaatagggtagtattgacaagccaattacaaatcattaacaaaaaattgctctaaagcatccgtatcgcaggacgcaaacgcatatgcaacgtggtggcagacgagcaaaccagtagcgctcgaaggagaggtgaatggaaagtaaagtagttgttccggcacaaggcaagaagatcaccctgcaaaacggcaaactcaacgttcctgaaaatccgattatcccttacattgaaggtgatggaatcggtgtagatgtaaccccagccatgctgaaagtggtcgacgctgcagtcgagaaagcctataaaggcgagcgtaaaatctcctggatggaaatttacaccggtgaaaaatccacacaggtttatggtcaggacgtctggctgcctgctgaaacccttgatctgattcgtgaatatcgcgttgccattaaaggcccgctgaccactccggttggtggcggtattcgctctctgaacgttgccctgcgccaggaactggatctctacatctgcctgcgtccggtacgttactatcagggcactccaagcccggttaaacaccctgaactgaccgatatggttatcttccgtgaaaactcggaagacatttatgcgggtatcgaatggaaagctgactctgccgacgccgagaaagtgattaaattcctgcgtgaagagatgggcgtgaagaaaattcgcttcccggaacattgcggtatcggtattaagccgtgttctgaagaaggcaccaaacgtctggttcgtgcagcgatcgaatacgcaattgctaacgatcgtgactctgtgactctggtgcacaaaggcaacatcatgaagttcaccgaaggcgcgtttaaagactggggctacgagctggcgcgtgaagagtttggcggtgaactgatcgacggcggcccgtggctgaaagttaaaaacccgaacaccggcaaagagatcgtcattaaagacgtgattgctgatgcattcctgcaacagatcctgctgcgtccggctgaatatgatgttatcgcctgtatgaacctgaacggtgactacatttctgacgccctggcagcgcaggttggcggtatcggtatcgcccctggcgcaaacatcggtgacgaatgcgccctgtttgaagccacccacggtactgcgccgaaatatgccggtcaggacaaagttaacccaggttctattattctctctgctgagatgatgttacgccatatgggctggactgaagcggctgacctgattgttaaaggtatggaaggcgcaatcaacgccaagaccgtaacctatgacttcgaacgtctgatggaaggcgctaagctgctgaaatgttcagaatttggtgangcgatcatcaagaacatgtaatcactacatgtgttaaatattgaaacgnnnnnnnnnnnnnnnnnnnnnnnnnnnnnnnnnnnnnnnnnnnnnnnnnnnnnnnnnnnnnnnnnnnctgagatattcaattttccagtgccggatgaggcacaaaaggagcggcgcgtggcagatctcgatgatggttatacgcgcattgcaaatgagttgctggaagctgtgatgctggccggattaacacagcaccagcttctggtcttcctggctgtcatgcgcaaaacatatggctttaataaaaaactggattgggtgagcaacgagcaactttccgaattgaccgggatattgccgcacaagtgttcttctgcaaaaagcgttctggtaaagcgtgggattcttattcagagcgggcggaatatcggcattaataatgtggtcagtgaatggtcaacattacccgaatcaggtaagaaaaataaagtttacctgaaannggtaannttacctgaatcaggtaagaaaagtttacccaaatcaggtaaaggcgtttacccgaatcaggtaaacacaaaagacaaactaacaaaagacaatataaaacctttttcgtccgagaattctggcgaatcctctgaccaaccagaaaacgatcttcctgtggagaaaccagatgctgcaattcagagcggcagcaggtgggggacagcagaagacctgaccgccgcagagtggatgtttgacatggtgaagaccatcgcgccatcagccagaaaaccgaattttgcagggtgggctaacgatatccgcctgatgcgtgaacgtgacggacgtaaccaccgcgacatgtgcgtgctgttccgctgggcatgccaggacaacttctggtccggtaacgtgctaagtccggccaaactccgcgacaagtggacccaactcgaaatcaaccgtaacaagcaacaggctggcgtgacagccggaaaatcaaaactggacctgacaaacactgactggatttatggggtggatttatgaaaaacatcgccgcacagatggttaactttgaccgtgagcagatgcgccggatcgccaataacatgccggaacagtacgacgaaaagccgcaggtacagttggtagcgcagatcatcaacggtgtgttcagccagttactggcaactttcccggcgagcctggctaaccgggaccagaacgaactgaacgaaatccgccgccagtgggttctggctttccgggaaaacgggatcaccacaatggaacaggttaacgcaggaatgcgcgtagcccgtcggcagaatcgaccatttctgccatcacccgggcagtttgttgcatggtgccgggaagaagcatccgttatcgccggactgccaancgtcagcgagctggttgatatggtttacgagtattgccggaagcgaggcctgtatccggatgcagagtcttatccgtggaaatcgaacgcgcactactggctggttaccaacctgtaccagaacatgcgggccaatgcgctgactgacgcggaattacgacgcaaggctgccgatgaactgacctgtatggcagcgcgaattaaccgtggtgagacgatacctgaaccagtaaaacaacttcctgtcatgggcggcagacctctaaatcgtgttcaggcgctggcgaagatcgcagaaattaaagctaagttcggactgaaaggagcaagtgtatgacgggcgaagaggcaattattcattacctggggacgcataatagcttctgtgcgccggacgttgccgcgctaacaggcgcaacagtaaccagcataaatcaggccgcggctaaaatggcacgggcaggtcttctggttatcgaaggtaaggtctggcgaacggtgtattaccggtttgctaccaaggaagaacgggaaggaaaggtgagcacgaatatgatttttaaggagtgtcgccagagtgccgcgatgaaacgggtattgttggtatacacaacttagcatcgaaggcctattgttttcgacaggaggccatcgaaatgacactatggtaccgtctttacccaccgccttctgctaagtttaggaatacaagatgttgctgccgttaaaaaatagtcgtaatttctattagaatttgggcaatataaccagcacatagataagggagtcgttttatgcacgaactatttgtgctggttttgagcacctgtgctagcctcagcaatatgtcaggttgttcagtggacgtagtgaatgtcaacaccacaaaagagccggtaaacgtcttttatagcaggaaagactgcgaagaaagcatgaaaaacattatgctaaatcatgctctataccatgaagtatcaggcagagagccatatatggcaaagtgcgaacaagtatttgtctcaaaaagtttaatgaaataattggccaaaaacgacatataacaaactcttataggagcttaacgtggaagattacttagtttttggtttaggttatgaaggcgatataaagaacgatgaagcagggcttgataagataagcgtggtaacgaaatcggtagtgcgttctaccaattccaatgaaccagtggtttaccaagtgactgagtttaaagaatttaatgttgtgagacatcaagcgtttgatagtgaatactacaacatagcattcgatgtcttaccatcccgcgtccgtattgatgctgcaatccgtaaatatcaccccaagaaatcctcctcagcttagtaagctttgattttccattatcaaccagcaataataatgtcctcggagcctgaacaactccggtgacttctgcgctaaacggggacgtttatgcgcacatacaatccaaactctcttctcccttcactgatgcagaaatgcacctgtggttctttgcatccaacgtttgacctctgcggaggtgaagcgtgaacctcccacaagacggtatcaaattgcatcgcggtaacttcactgctatcggccagcagatccagncttatctgnnnnnnggaaaatgctttcgcatggtgcttaaaccgtggcgtgagaaacgcagtctttcccagaatgcactcagccacatgtggtacagcgaaatcagtgaatacctcatcagcagggggaaatcgttcgctacttcagcatgggtaaaagatgctctcaaacacacatacctcggttatgaaaccaaggacctggttgatgtcgtaaccggcgaaatcactactatccagtcgttacgccatacctccgatcttggtaccggagagatgtatgtcttcctgtgtaaggttgaagcctgggcgatgaatattggctgccacctgactattccacagagctgcgagttccagctgctgcgcgacaagcaggaggcgtaatggctacaccgcttattcgtgtcatgaacggacacatctacaaagtaccaaatcgtcgtaagcgtaaacctgagctgaagccatccgaaataccaacactgctcggatataccgccagcctggttgataaaaaatggttgcgactggcagcaaggaggaatcatggctgatttgagaaaagcagcgcgtagtcgggaatgccaagtaagaatccctggcgtatgtaatggcaaccctgaaacgtctgtactggcacatatccggctgactggattgtgcggcaccggtaccaaaccgccagacttgattgccaccattgcatgttctgcctgccacgacgaaatcgaccgccgcacacattttgtcgatgctgcatatgcaaaagaatgcgcgctggaaggtatggcgagaacacaggttatctggctgaaagagggggttattaaggcgtgaatacctacagcatcacattaccttggcctccgagcaataatcgctactaccggcataatcgcgggcgcacgcacatcagcgcagaagggcaggcataccgtgataacgtcgcccgaatcatcaaaggctccatgctggatatcggcctggctatgccagtgaaaatccgtattgagtgccacatgccggatcgccgtcgccgtgacctggataatctgcaaaaagccgcttntgacgcactcaccaaagcaggtttctggctggatgatgcacaggtcgttgattaccgtgttgtgaagatgcccgttaccaaaggtgggaagctggagctgaccatcaccgaactggggaatgaatgatgtttgagtcttatatggcagaacgtcttcgccaccgctggatgcgccngcnnnnnnnncgttttcctggttctgttttgaccgattaccggatactgaagaattacgccaaaacactgaaaggagctgccgcatgaatacccaatatttacagtatgtccgcgagcaactcattgtggctaccgctgatttgagcggagcaacgaaaggacagcttgaagcctggctggagcatgcacaatttgatactggtacatacaaacgaaagaagccgcgcattctggatgaggtaactggcaggatgattacgctggataatccgccgatttccggtaagcagtcgtacgcaaaaggttcatccattgcactggtcagccaggttgagttctcaacctcgtcatggcgccgcgcggttctgtctctcgaagaacatcagaaagcgtggttgctgtggagttacagcgaaagtgttcgctgggaacatcaggtcaccataacgcagtgggcatggagcgagtttaagactctgttgggtaccaggaaaattgcaggtaagacactggaacgtttgaagaagttgatctggctggcggcacaggatgtgaagaacgagctggcagggggtaagacctatgaataccaggagctggcatcactggtgggagtgacatcaaaaaactggtctgagacatttactgaacgctgggttgcaatgaaacacatttttctacagcttgatagccaagctttattgcttttaacgaaaacacgttcaaaacaaaagaccacattttcacagcaagatattgcaaaactggattaaaaatcatatattttatgtaaatctgatattttgccaatgttgtacgcactggcagtaatccaaattcaagcccgaggtttaaagccttgggcttttctgtttctgaacggtgagtagccttccaacctaccccagccagggggtcttcagctgttgagttgatattgcttagccctctgttgccagctacatgctggcttttttattctaggcttgtggggagcatcaactccgtgctttgtcgttaaattaccccgtgagcctgatttctgacatttaacgtcccggccttttgtcggcggcgaaacattggctattcatatgcacgaaaaagagagccttgccggagcgttctggctcgttttgctgatcatcgcaggttggggcggtctggtccgctacctgatagatgtgaagcagagtaaagcaacgtggagttggataaatgctctggctcaaatagtggtatcaggattcaccggtgttattggtggcctgatcagcatcgaaagtggattcagtatttacatgattctcgcgacagcggggattagtggtgcgatgggttcggttgcactgacgtacttctgggaacgactgacaggggtgaaaaatgcaaaatcttaatcctcagcgtaaagccttcctcgatatgttggcgtggtcagaaggaacggataacgggcgacaaccgacacgtaaccacggttatgatgttattgttggcggcgaactgtttactgattactccgatcaccctcgcaaacttgtcacgctacaccccaaactcaaatcaacagccgccggacgttatcagcttctttcacgctggtgggatgcttaccgtaaacagcttggtttgaaagacttctcccccaaaagccaggacgcagtggcattgcagcagattaaagagcgtggtgctttacctatgattgatcgcggtgatatccgtcaggcaatcgaccgttgcagtaatatctgggcttcactgccgggcgctggttatggtcagttcgagcataaggctgacagcctgattgcaaaattcaaagaagctggcggaacggtcagagagagtgaggtatgagcagaataaccgcgattatctccgctctgctcatctgcatcatcgtctgcctgtcatgggctgttaatcattaccgtgataacgccattacctacaaagcccagcgcgacaaaaatgccagagaactgaagctggcgaacgtggcaattactgacatgcagatgcgtcagcgtgatgttgctgcgctcgatgcaaaatacacgaaggagttagctgatgcgaaagctgaaaatgatgctctgcgtgatgatgttgccgctggtcgtcgtcggttgcacatcaaagcagtctgtcagtcagtgcgtgaagccaccaccgcctccggcgtggataatgcagcctccccccgactggcagacaccgctgaacgggattatttcacccttagagagaggctgatcactatgcaaaaacaactggaaggaacccagaagtatattaatgagcagtgcagatagagctgcccatatcgatgggcagctcatgcaattattgtgagcaatacacacgcgcttccagcggagtataaatgcctaaagtaataaaaccgagcaatccatttacgaatgtttgctgggtttctgttttaacaacattttctgcgccnccacaaattttagctgcatcgacagttttcttctgcccaattccagagacgaagaaatggtgggtgatggtttcctttggtgttactgctgccggtttgttttgaacagtaaacgtctgttgggcacatcctgtaataagcagggccagcgcagtagcgagtagcatttttttcatggtgttattcccgatgctttttaaagttcgcagaatcgtatgtgtagaaaattaaacaaaccctaaacaatgagttgaaatctcatattgttaatatttattaatgtatgtcagatgcgaaggatcgtcactgtattcccggattaactatgtccgcagccctgacagggaaactcctctgcgggagtgtccgggaataattaataacgatgcacacagggtttagcgcgtacacgtattgcattatgccaacgccccggtgctgacacggaagaaaccggacgttatgatttagcgtggaaagatttgtgtagtgtactgaatgctctcagtaaatagtaatgaattatcaaaggcatagtaatatcttttatgttcgtggatatttgtaacccatcggaaaactcctgctttagcaagattttccctgtattgctgaaatgtgatttctcttgatttcaacctatcataggacgtttctataagatgcgtatttcttgagaatttaacatttacaacctttttaagtccttttattaacacagtgttatcgttttctaacacaatgtgaatattatctgtggctagatagtaaatataatgtgagacattgtgacgttttagttcagaataaaacaattcacagtttaaatcttttcgcacttgatcgaatatttctttaaaaatggcaacctgagccattggtaaaaccttccatgtgatacgagggcgcgtagtttgcattatcgtttttatcgtttcaatctggtctgacctctttgtgttttgttgatgatttatgtcaaatattaggaatgttttcaattaatagtattggttgcgtaacaaagtgcggtcctgctggcattctggagggaaatacaaccgacagatgtatgtaaggccaacgtgctcaaatcttcatacagaaagatttgaagtaatattttaaccgctagatgaagagcaagcgcatggagcgacaaaatgaataaagaacaatctgctgatgatccctccgtggatctgattcgtgtaaaaaatatgcttaatagcaccatttctatgagttaccctgatgttgtaattgcatgtatagaacataaggtgtctctggaagcattcagggcaattgaggcagcgttggtgaagcacgataataatatgaaggattattccctggtggttgactgatcaccataactgctaatcattcaaactacttaacctgtgacagagccaacacgcagtctgtcactgtcaggaaagtggtaaaactgcaactcaattactgcaatgccctcgtaattaagtgaatttacaatatcgtcctgttcggagggaagaacgcgggatgttcattcttcatcacttttaattgatgtatatgctctcttttctgacgttagcctccgacggcaggcttcaatgacccaggctgagaaatttccggaccctttttgatcaagagcgatgttaatttgttcaatcatttggttaggaaagcggatgttgcgggttgttgttctgcgggttctgttcttcgttgacatgaggttgccccgtattcagtgtcgctgatttgtattgtctgaagttgtttttacgttaagttgatgcggatcaattaatacgatacctgcgtcataattgattatttgacgtggtttgatggcgtagatgcacgttgtgacatgtagatgataattattatcattttacgggtcctttccggcgatccgacaggttacggggcggcgacctcgcgggttttnnnnatttatgaaaattttccggtttaaggcgtttccgttcttcttcgttataacntaatnnnnnnnnnnaaaanaccctctgaaaagaaaggaaacgacaggtgctgaaagcgagctttttggcctctgtcgtttcctttctctgtttttgtccgtggaatgaacaatggaagtcaacaaaaagcagctnnnngacattttcggtgcgagtatccgtaccattcagaactggcaggaacagggaatgcccgttctgcgaggcggtggcaagggtatgaggtgctttatgactctgccgccgtcataaaatggtatgccgaaagggatgctgaaattgagaacgaaaagctgcgccgggaggttgaagaactgcggcaggccagcgaggcagatctccagccaggaactattgagtacgaacgccatcgacttacgcgtgcgcaggccgacgcacaggaactgaagaatgccagagactccgctgaagtggtggaaaccgcattctgtactttcgtgttgtcgcggatcgcaggtgaaattgccagtattctcgacgggctccccctgtcggtgcagcggcgttttccggaactggaaaaccgacatgttgatttcctgaaacgggatatcatcaaagccatgaacaaagcagccgcgctggatgaactgataccggggttgctgagtgaatatatcgaacagtcaggttaacaggctgcggcattttgtccgcgccgggcttcgctcactgttcaggccggagccacagaccgccgttgaatgggcggatgctaattactatctcccgaaagaatccgcataccaggaagggcgctgggaaacactgccctttcagcgggccatcatgaatgcgatgggcagcgactacatccgtgaggtgaatgtggtgaagtctgcccgtgtcggttattccaaaatgctgctgggtgtttatgcctactttatagagcataagcagcgcaacacccttatctggttgccgacggatggtgatgccgagaactttatgaaaacccacgttgagccgactattcgtgatattccgtcgctgctggcgctggccccgtggtatggcaaaaagcaccgggataacacgctcaccatgaagcgtttcactaatgggtgtggcttctggtgcctgggcggtaaagcggcaaaaaactaccgtgaaaagtcggtggatgtggcgggttatgatgaacttgctgcttttgatgatgatattgaacaggaaggctctccgacgttcctgggtgacaagcgtattgaaggctcggtctggccaaagtccatccgtggctccacgccaaaagtgagaggcacctgtcagattgagcgtgcagccagtgaatccccgcattttatgcgttttcatgttgcctgcccgcattgcggggaggagcagtatcttaaatttggcgacaaagagacgccgtttggcctcaaatggacgccggatgacccctccagcgtgttttatctctgcgagcataatgcctgcgtcatccgccagcaggagctggactttactgatgcccgttatatctgcgaaaagaccgggatctggacccgtgatggcattctctggttttcgtcatccggtgaagagattgagccacctgacagtgtgacctttcacatctggacagcgtacagcccgttcaccacctgggtgcagattgtcaaagactggatgaaaacgaaaggggatacgggaaaacgtaaaaccttcgtaaacaccacgctcggtgagacgtgggaggcgaaaattggcgaacgtccggatgctgaagtgatggcagagcggaaagagcattattcagcncccgttcctgancgtgtggcttacctgaccgccggtatcgactcccagctggancgctacgaaatgcgcgtatggggatgggggccgggtgaggaaagctggctgattgancggcagattattatgggccgccacgatgatgaacagacgctgctgcgtgtggatgaggccatcaataaaacctatatccgccggaatggtgcagaaatgtcggtatcccgtatctgctgggatattggcgggattgacccgacnattgtgtatgaacgctcgaaaaancatgggctgttccgggtgatccccattaaaggggcatccgtctacggaaagcctgtggccagcatgccacgtaagcgaaacaaaaacggggtttaccttaccgaaattggtacggataccgcgaaagagcagatttataaccgcttcacactgacgccggaaggggatgaaccgcttcccggtgccgttcacttcccgaataacccggatatttttgatctgaccgaagcgcagcagctgactgctgaagagcaggtcgaaaaatgggtggatggcaggaaaaaaatactgtgggacagcaaaaagcgacgcaatgaggcgctcgactgcttcgtttatgcgctggcggcgctgcgcatcagtatttcccgctggcagctggatctcagtgcgctgctggcgagcctgcaggaagaggatggtgcagcaaccaacaagaaaacactggcagattacgcccgtgccttatccggagaggatgaatgacgcgacaggaagaacttgccgctgcccgtgcggcactgcatgacctgatgacaggtaaacgggtggcaacagtacagaaagacggacnnnnggtggagtttacggccacttccgtgtctgacctgaaaaaatanattgcagagctggaagtgcagaccggcatgacacagcgacgcaggggacctgcaggattttatgtatgaaaacgcccaccattcccacccttctggggccggacggcatgacatcgctgcgcgaatatgccggttatcacggcggtggcagcggatttggagggcagttgcggtcgtggaacccaccgagtgaaagtgtggatgcagccctgttgcccaactttacccgtggcaatgcccgcgcagacgatctggtacgcaataacggctatgccgccaacgccatccagctgcatcaggatcatatcgtcgggtcttttttccggctcagtcatcgcccaagctggcgctatctgggcatcggggaggaagaagcccgtgccttttcccgcgaggttgaagcggcatggaaagagtttgccgaggatgactgctgctgcattgacgttgagcgaaaacgcacgtttaccatgatgattcgggaaggtgtggccatgcacgcctttaacggtgaactgttcgttcaggccacctgggataccagttcgtcgcggcttttccggacacagttccggatggtcagcccgaagcgcatcagcaacccgaacaataccggcgacagccggaactgccgtgccggtgtgcagattaatgacagcggtgcggcgctgggatattacgtcagcgaggacgggtatcctggctggatgccgcagaaatggacatggataccccgtgagttacccggcgggcgcgcctcgttcattcacgtttttgaacccgtggaggacgggcagactcgcggtgcaaatgtgttttacagcgtgatggagcagatgaagatgctcgacacgctgcagaacacgcagctgcagagcgccattgtgaaggcgatgtatgccgccaccattgagagtgagctggatacgcagtcagcgatggattttattctgggcgcgaacagtcaggagcagcgggaaaggctgaccggctggattggtgaaattgccgcgtattacgccgcagcnnnngtccggctgggaggcgcaaaagtaccgcacctgatgccgggtgactcactgaacctgcagacggctcaggatacggataacggctactccgtgtttgagcagtcactgttgcggtatatcgctgccgggctgggtgtctcgtatgagcagctttcccggaattacgcccagatgagctactccacggcacgggccagtgcgaacgagtcgtgggcgtactttatggggcggcgaaaattcgtcgcatcccgtcaggcgagccagatgtttctgtgctggctggaagaggccatcgttcgccgcgtggtgacgttaccttcaaaagcgcgcttcagctttcaggaagcccgcagtgcttgggggaactgcgactggataggctccggtcgtatggccatcgatggtctgaaagaagttcaggaagcggtgatgctgatagaagccggactgagcacctacgagaaagagtgcgcgaaacgcggtgacgactatcaggaaatttttgcccagcaggtccgtgaaacgatggagcgccgtgcagccggtcttaaaccgcccgcctgggcggctgcggcatttgaatccggactgcgacaatcaacagaggaggagaagagtgacagcagagctgcgtaatctcccgcatattgccagcatggcttttaatgagccgctgatgcttgaacccgcctatgcgcgggttttcttttgtgcgcttgcaggccagcttgggatcagccgcctgacggatgcagtatccggcgacagcctgactgccggagaggcacccgcggcgctggcgttatccggtgatgatgacggaccacgacaggcccgcagttatcaggtcatgaacggcatcgccgtgctgccggtgtccggtacgctggtcagccggacgcgggcgctgcagccgtattcgggaatgaccggttacaacggcattatcgcccgtctgcaacaggctgccagcgatccgatggtggacggcattctgctggatatggacacaccgggcgggatggtggcgggagcatttgactgtgctgacatcatcgcccgtgtgcgagacataaaaccggtatgggcgctggccaacgacatgaactgcagtgcaggtcagctgcttgccagcgccgcctcccggcgtctggtcacgcagaccgcccggacaggctccattggcgtcatgatggctcacagtaattacggtgctgcgctggagaaacagggcgtggaaatcacgctgatttacagcggcagccataaggtggatggcaacccctacagccatctaccggatgatgtccgggaaacactgcagtcccggatggatgcaacccgccggatgtttgcacagaaggtgtcggcatataccggcctgtccgtgcaggctgtgctggataccgaggctgcagtgtacagcggtcaggaggccattgatgccggactggctgatgaacttgtgaacagtaccgatgcgatcaccgncatgcgtgatgcactggatgcacgtaaatcccgtctctcaggagggcgaatgaccaaagagactcaatcaacaactgtttcagccactgcttcgcaggctgacgttactggcgtggtgcaagcgacggagggcgagaacgccagcgcggcgcagccggacgtgaacgcgcagatcaccgcagcggttgcggcagaaaacagtcgcattatggggatcctcaactgtgaggaggctcacggacgcgaagaacaggcncgcgtgctggccgaaacccccggtatgaccgtggaaacggcccgccgcattctggccgcagcaccacagagtgcacaggcgngcagtgacactgcgctggatcgtctgatgcagggggcnccggcaccgctggttgcaggtaacccggcatctgatgccgttaacgatttgctgaacacaccagtgtaagggatgtttatgacgagcaaagaaacctttacccattaccagccgctgggcaacagtgacccggctcataccgcaaccgcgcccggcggattgagtgcgaaagcgcctgcaatgaccccgctgatgctggacacctccacccgtaagctggttgcgtgggatggcaccaccgacggtgctgccgttggcattcttgcagttgctgctgaccagaccagcaccacactgacgttctacaagtccggcacgttccgttatgaggatgtgctctggccggaggctgccagcgacgnnnnngaaaaaacggaccgcgtttgccggaacggcaatcagcatcgtttaacntnacccttcatcactaaaggccgcctgtgcggctttttttacgggatttttttatgtcgatgtacacaaccgcccagctgctggcggcaaatgagcagaaatttaagtttgatccgctgtttctgcgtctctttttccgtgagagctatcccttcactacggagaaagtctatctctcacaaattccgggactggtaaacatggcgctgtacgtttcgccgattgtttccggtgaggttatccgttcccgtggcggctccacctctgaatttacgccgggatatgtcaaacccaagcatgaagtgaatccgcagatgaccctgcgtcgcctgccggatgaagatccgcagaatctggcggacccggcttaccgccgccgtcgcatcatcatgcagaacatgcgtgacgaagagctggccattgctcaggtcgaagagatgcaggcagtttctgccgtgctcaagggcaaatacaccatgaccggtgaagccttcgatccggttgaggtggatatgggccgcagtgcggcgaacaacatcacgcagtccggcggcacggagtggagcaagcgtgacaagtccacgtatgacccgaccgacgatatcgaagcctacgcgctgaacgccagcggcgtggtgaatatcatcgtgtttgacccgaaaggctgggcgctgttccgttccttcaaagccgtcagggagaagctggatacccgtcgcggctctcattccgaactggagacagcggtaaaagacctgggcaaagcggtgtcttataagggaatgtatggcgatgtggccatcgtcgtgtattccggacagtacgtggaaaacggcgtcaaaaagaacttcctgccggacaacacgatggtgctgggtaacactcatgcacgcggtctgcgcacctatggctgtattcaggatgcggnnnnnnnnnnnnnnnnnnnnnnnnnnnnnnnnnnnnnnnnnnnccggcgcgagagttcaccatgattcagtcagcaccgctgatgctgctggctgatcctgatgagttcgtgtccgttcaactggcgtaatcatggcccttagggnnnnnnnnnnnnnnnnnnnnnnnnnnnnnnnnnnnnnnnntggaggagtccatgaagaaagatgaactgattgcccgtctccggtcgctgggtgagcaactgaaccgtgatgtcagcctgacggggacgaaagaagaactggcgctccgtgtggcagagctggaagaggagcttgatgacacggatnnnnnnnnnnnnnnnnnnnnnnnnnnnnnnnnnnnnnnnnnnnnnnnnnnnnnnnntgcgctgaccggacatgaaaatgaggtggtatcnnnnnnnnnnnnnnnnnnnnnnnnnnnnnnnnnnnnnnnnacgctgcataccgatgcacttcacgccacgcgggatgaacctgtggcatttgtgctgccgggaacggcgtttcgtgtctctgccggtgtggcagccgaaatgacagagcgcggcctggccagaatgcaataacgggaggcgctgtggctgatttcgataacctgttcgatgctgccattgtccgcgccgatgaaacgatacgcgggtacatgggaacgtcagccaccatgacatccggtgagcagtccggcgcagtaatacgtggtgtttttgatgaccctgaaaatatcagctatgccggacagggcgtgcgcgttgaaggctccagcccgtccctgtttgtccggactgatgatgtgcggcanctgyggcgtggagacacgctgaccatcggtgaggaaaacttctggatagaccgggtttcgccggatgatggtggaagctgtcatctctggcttgggcggggcgtaccgcctgccgttaaccgtcgncnntgaangggggatgtatggccataaaaggtcttgagcaggccattgaaaacctcagccgtatcagcaaaacggcggtgcctggtnnnnnnnnnnnggccattaaccgcgttgcttcatccgcgatatcgcagtcggcgtcacaggttgcccgtgagacnnnnnnacgccggaaactggtaaaggaaagggccagnctgaaaannnnnnnnnnnnnnnatccgcaggccagaatcaaagttaaccggggggatttgcccgtaatcaagctgggtaatgcgcgggttgtcctttcnnnnnnnnngcgtcgtaaaaaggggcagcgttcatccctgaaaggtggcggcagcgtgcttgtggtgggtaaccgtcgtattcccggcgcgtttattcagcaactgaaaaatggccggtggcatgtcatgcagcgtgtggccgggaaaaaccgttaccccattgatgtggtgaaaatcccgatggcggtgccgctgaccacggcgtttaaacanaatattgagcggatacggcgtgaacgtcttccgaaagagctgggctatgcgctgcagcatcaactgaggatggtaataaagcgatgaaacatactgaactccgtgcagccgtactggatgcactggagaancatgacaccggggcgacgttttttgatggtcgccccgctgtttttgatgaggcggattttccggcagttgccgtttatctcaccggcgctgaatacacgggcgaagagctggacagcgatacctggcaggcggagctgcatatcgaagttttcctgcctgctcaggtgccggattcagagctggatgcgtggatggagtcccggatttanccggtgatgagcgatatcccggcactgtcagatttgatcaccagtatggtggccagcggctatgactaccggcgcgacgatgatgcgggcctgtggagttcagccgatctgacttatgtcattacctatgaaatgtgaggacgntatgcnnnnnccaaatccnnnngcaccggtgaaaggtgccgggaccaccctgtgggtttataaggggancggngacnnnnnnnnnnnnnnnctttcagannatgactggtcgcgtctggcaaaagttaaagacctgacgcccggcgaactgaccgctgagtcctatgacgacagctatctcgatgatgaagatgcagactggactgcgaccggncaggggcagaaatcygccggagataccagcttcacgctggcgtggatgcccggagagcaggggcagcaggcgctgctggcgtggtttaatgaaggcgatacccgtgcctataaaatccgcttcccgaacggcacggtcgatgtgttccgtggctgggtcagcagtatcggtaaggcggtgacggcgaaggaagtgatcacccgcacggtgaaagtcaccaatgtgggacgtccgtcgatggcagaagatcgcagcacggtaacagcggcaaccggcatgaccgtgacgcctgccagcacctcggtggtgaaagggcagagcaccacgctgaccnnnncnnnccagccggagggcgnaaccgacaagagctttcgtgcggtgtctgcggataaaacaaaagccaccgtgtcggtcagtggtatgaccatcaccgtgannngtgttgctgcaggcaaggtcaacattccggttgtatccggtaatggtgagtttgctgcggttgcagaaatcaacgtcaccgccagttaatccggagagtcagcgatgttcctgaaaaccgaatcatttgaacataacggtgtgaccgtcacgctttctgaactgtcagccctgcagcgnattgagcatctcgccctgatgaaacggcaggcagaacaggcggagtcagacagcaaccggaagtttactgtggaagacgccatcagaacnnnnnnnnnnnnnnnnnnnnnnnnnnnnnnnnnnnnnnngatgtccctgtggcataaccatccgcagaagacgcagatgccgtccatgaatgaagccgttaaacagattgagcaggaagtgcttaccacctggcccacggaggcaatttctcatnctgaaaacgtggtgtaccggctgtctggtatgtatgagtttgtggtgaataatgcccctgaacagncagaggacnnnnnnnnnnnnnnnnnnnnnnnnnnnnnnnnnnnnnnnnnnctgtttctgcgggaaagtgttcgacggtgagctgagttttgccctgaaactggcgcgtgagatggggcgacccgactggcgtgccatgcttgccgggatgtcatccacggagtatgccgactggcaccgcnnnnnnagtacccattattttcatgatgttctgctggatatgcacttttccgggctgacgtacaccgtgctcagcctgtttttcagcgatccgganatgcatccgctggatttcagtttgctgaaccggcgtgaggctgacgaagagcctgaagatgatgtgctgatgcagaaagcggcagggcttgccggaggcgttcgttttggcccggacgggnnngaagttnnccccgnttccccggatgtggcggacatgacggaggatgacgtaatgctgatgacagtatcagaagggatcgcaggaggagtccggtatggctgaaccggtaggcgatctggtcgttgatttaagtctggatgcggccagatttgacgagcagatggccagagtcaggcgtcatttttccggtacggaaagtgatgcgaaaaaaacagcggcagtcgttgaacagtcgctganccgacaggcactggctgcacagaaagcggggatttccgtcgggcagtataaagcngccatgcgtatgctgcctgcgcagttcannnanntggccacgcagcttgcaggcgggcaaagtccgtggctgatcctgctgcaacagggtggncaggtgaaggactccttcggcgggatgatccccatgttcagggggcttgccggtgcgatyrccctgccgatggtnnnngccacctcgctggcggtggcgaccggtgcgctggcgtatgcctggtatcagggcaactcaaccctgtccgatttcaacaaaacgctggtcctttccggcnnnnnggcnggnctgacggcagatcgtatgctggtcctgtccagagccgggcaggcggcagggctgacgtttaaccagaccagcgagtcactcagcgcactggttaaggcgggagtaagcggtgaggctcagattgcatccatcagccagagtgtggcgcgtttctcctctgcatccggcgtggaggtggacaaggtygctgaagccttcgggaagctgaccacagacccgacgtcagggctgacagcgatggcacgccagttccataacgtgacngcggagcagattgcgtatgttgctcagttgcagcnttccggcgangaagccggggcattgcaggcngcgaacgaggccgcnacgaaagggtttgatgaccagacccgccgcctgaaaganaacatgggtacgctggagacctgggcagacangacagcncgggcattcaaatccatgtgggatgcggtgctggatactggtcgtcctgataccgcgcaggagatgctgattaaggcagaggctgcgtttaagaaagcggacgacatctggagtctgcgcaaggatgattatttcgttaacgatgaagcgcaggcgcgttactgggatgatcgtgaaaaggcccgtcttgcgnnnnnnnnnnnnnnnaagaaggctgaacagcagagtcaacaggacaaaaatgcgcagcancagagcgatactgaagcgtcacggctgaaatataccgaagaggcgcagaangcttacgaacgtctgcagacnccgctggagaaatataccgcccgtcaggaagaactgaacaaggcactgaangacgggaaaatnctgcaggcagattacaacacgctgatggcggcggcgaaaaaggannnnnnnnnnnnnnnnnnnnnnnnnnnnnnnnnnnnnnnnnnnnnnnnnnnnnnnnnnnnnnnnnnnnnnnnnnnnnnnnnnnnnnnnnnnnnnnnnnnnnnnnnnnnnnnnnnnnnnnnnnnnnnnnnnnnnnnnnnnnnnnnnnnnnnnnnnnnnnnnnnnnnnnnnnnnnnnnnnnagccgggataaagtgattagtgaggacggtgagctgatcnnnnnnnnnnnnnnnnnnnnnnnnnnnnnnnnnnnnnnnnnnnnnnnnnnnnnnnnnnnnnnnnnnnnnctnnnncggaatccnnatcttgctgagcgggaagacctcgtgcagggggaactgccgttttctgtgtccgtgctgannnnnnnnnnnnnnnnnnnnnnnnnnnnnnnnnnnnnnnnnnnnnnnnnnnnnnnnnnnnnnntgacacagatgataagtgttctgaagccggtgttnnnnnnnnnnnnnnnnnnnnnnnnnnnnnnnnnnnnnnnnnnnnnnnggnnnattcanncggatatccgtggcaggagcagccgggagnngnnnnnnnnnnnnnnnnnnnnnncgcaggcggnnatcnnnntctgggtgcgcggtcagtccggccgggaaatcacggcagcgtcacgacttcatgtgctgagtggtccatggcgtgaccggatcctgaacgttgtcnnnnngcncgtgccggatgcgannnnnnggcgtctggaaattctctgtcggctgggagnnnnnnnnnnnnnnaaaccctgctggatttttcggggnnnnnnnnnntcagncgcgatttgcagcttctgagtggtgcggaaaataaccgggtgctgcnnnnnnnnnnnnnnnnnnnnnnnnnnnnnnnnnnnnnnnnnnnnnnnnnnnnnnnnnnnnnnnnnnnnnnnnnnnnnnnnnnnnncnncgatggcgggatggaatccggtgtccatatccgtggtgttaatccggnnnnnnnnnnnnnnnnnnnnnnnnnnnnnnnnnnnnnnnnnnnnnnnnnnnnnnnnnnnnnnnnnnnnnnnnnnnnnnnnnnnnnnnnnngaatatgccaccgcacccgtttgtgcncccggcgtttgatgtgcgcagtgaacaggcagctcaggtggcgattgcgcggatgaaccgggccattgatnnnnnnnnnnnnnnnnnnnnnnnnnnnnnnnnnnnnnnggnggatttgtatccttatctggcgcatcttgccggcgnnnnnnnnnnnnnnnnnnnnnnnnnnnnnnnnnnnnnnnnnnnnnnnnnnnnnnnnnnnnnnnnnnnnnntttatgccgggactgtgacgcaggcgcgtcagatacnnnnnnnnnnnnnnnnnnnnnnnnnnnnnnnnnnnnnnnnnnnnnnnnnnnnnnnnnnnnnnnnnnnnnnggagtttcaggtcacggtgtgactttnnnnnnnnnnnnnnnnnnnnnnnnnnnnnnnnnnnnnnnnnnnnnnnnnnnnnnnnnnnnnnnnnnnctgctttgtatgaacgctcacagnnnnnnnnnnnnnnnnnnnnnnnnnnnnnnnnnnnnnnnnnnnnnnnnnnnnnnnnnnnnnnnnnnnnnnnnnnnnnnnnnnnnnnnnnnnnnnnnnnnnnnnnnnnnnnnnnnnnnnnnnnnnnnnnnnnnnnnnnnnnnnnnnnnnnnnnnnnnnnnnnnnnnnnnnnnnnnnnnnnnnnnnnnnnnnnnnnnnnnnnnnnnnnnnnnnnnnnnnnnnnnnnnnnnnnnnnnnnnnnnnnnnnnnnnnnnnnnnnnnnnnnnnnnnnnnnnnnnnnnnnnnnnnnnnnnnnnnnnnnnnnnnnnnnnnnnnnnnnnnnnnnnnnnnnnnnnnnagttcctggnnnnagtgcgtcagcacacctggtcannnnnnnnnnnnnnnnnnnnnnnnnnnnnnnnnnnnnnnnnnnnnnnnnnnnnnnnnnnnnnnnnnnnnnnnnnnntggtaccgctggcgtttgtgaaannnnnnnnnnnnnnnnnnnnnnnnnnnnnnnnnnnnnnnnnnnnnnnnnnnnnnnnnnnnnnnnnnnnnnnnnnnnnnnnnnnnnnnnnnnnnnnnnnnnnnnnnnnnnnnnnntactgacactttcagtaaagccaatncnnanncnnnnnnnnnnnnnnnnnnnnnnnnnnnnnnnnnnnnnnnnnnttctgcagaacagccgcagagcattacctctgatgcgtgtacagtaacggttaatggtgcgggcggataaggcttatggcannnnntctgaaaacactgnngctggccagactgtcggggttccgtcataaaacggtgaaggtgcnnnnnnnnnnnnnnnnnnnnnnnnnnnnnnnnnnnnnnnngnnagaggcctggtatctgtggcaggaagtgctcaatggtgatggagaggatgacgataccnngtcggtggtggcgaaaacccgcnntaacctggaagcggatgtgacgctgttcnnnnnnnnnnnnnnnnnnnnnnnnnnnnnnnnnnnnnnnnnnnnnnnnnnnnnnnnnnnnnnnnnnnnnnnnnnnnnnnnnnnnnnnnnnnnnnnnnnnnnnnnnnnnnnnnnnnnnnnnnnnnnnnnnnnnnnnnnnnnnnnnnnnnnnnnnnnnnngnnnnnaaaaagtagcccgcccggaaattcgctttctgatgcgacttnnnnnnnnnnnnnnnnnnnnnntatccgaactgcgncacagcctgagtnngnnnnnnnngatgatgtggatggagttcgacaggntatccccgctgggtgnnnnnnnnnnnnnnnnnnnnnnnnnnnnnntcgtgaaagcggttttcggggcacaggggatgaatgttgcactgaaggacgccatgctctgctggggcgaggatgaggataagccggaggtggatccgtttgcggcgctggaagacgcgctgagccttgcagnnnnnnnnnnnnnnnnnnnnnnnnnnnnnnnnnnnnnnnnnnaggtgaatggcgacgttacgtgaactgattannnnnnnntcggcaaattcacagtcattccagtcggagatccagcgggcgtcccgtatgnnnnntgaatattaccggaccctgcagaatggcnnnngnnnnnnnnnnnnnnnnnnnnnnnnnnnnnnnnnnnnnnnnnnnnnnnnnnnnnnnnngtgaatgcccgtctgaaacaggcgtcgcannnnnnnnnnnnnnnnnnnnnnnnnnnnnnnnnnnnnnnnnattttcgtcatcacagaaagtgctgatggatatcanncagcggacaggcacggcattttcggataatgcnnnnnnnnnnnnnngttcggctgcctcgatgcgtgaannnnnnnnnnnnnnnnnnnnnnnnnnnnnnnnnnnnnnnnnnnnnnnnnnnnnacagggctgaanntatccggtgcnnnnnnnnnnnnnnnnnnnnnnnnnnnnnnnnnnnnnnnnnnnnnnnnnnnnnnnnnnnnnnnnnnnnnnnnnnnnnnnnnnnnnnnnnntcatacgtgcactggctgcgggtatgggcgtggcccgtannnnnnnnnnnnnnnnnnnnnnnnnnnnnnnnnnnnnnnngctgggggtattgcgtgatgaatannnnnnnnnnnnnnnnnnnnnnnnnnnnnnnnnnnnnnnnnnnnnnnnnnnnnnnnnnnnnnnnnnnnnnnnnnnnnnnnnnnnnnnnnnnnnnnnnnnnnnnnnnnnnnnnnnnnntgaacggtgttgccggacagattgataatgtnnnnnnnnnnnnnnnnnnnnnnnnnnnnnnnnnnntggcccggtactttggcaatatnnnnnnnnnnnnnnnnnnnnnnnnnnnnnnnnnnnnnnnnnnnaccgtctgctggggctggggaatgaactnnnnnnnnnnnnnnnnnnnnnnnnnnnnnnnnnnnnnnnnnnnnnnnnnnnggccaccctggatgataaacagcagagtgccctgacaaaaacagagcgtgagctggccctgtccagactgaaaggggaagaaaaagagcgtgtccggctgggatatgcggcggatgacctcggttttgtgggtgatccgtatcaggaggcgagacaacgttatatcagtaatgccctggaagcctggcgcaataacgaggcgaataaacccaaatcccgnnnnnnnnnnnnnnnnnnnnnnnnnnnnnnnnnnnnnnnnnnnnnnnnnnnnaagcagcagaaagagcaactggcacnnnnnnnnnnnnntacagagctggcgaagctgaagtaccagacngcgcngggcgaactgaaaaccctgacggagatgcagaagcaggaactgctgcgtaacgcgaccctgattgaccagcaaaaaannnnggaacagttgcgatcccgggaagagacactgaagaatgagaatgnnnnnnnncgtgcgtcgaatgatgctgaactgctggggtacgggcagggggaacgagccagagaacgcnnncgggagttgcagcagatccgcgacagcttccgccagaaggatnnggaccttcagtctcagtatcagaccggggataacagtgaggatttttacannnnnnnnnnnnnnnnnnnnnnnnnnnnnnnnnnnnnnnnnnnnnnnnnnnnggnagccttttatgccgaatcggatgtgcagcgtgcggactggcagaaagggctgcaggagggattcagtaactgggtggataatgcgtccgattacgcctcacaggcagcacagcttgcgacggagggtatctcagggatggtgaataacatcacggagatgctgaacggaaataaagtggaatggcgcagctgggcctcatcagtgctgcaggaaatatcaaaagttcttatgaatgccgcgattgtcaannnnnnnnngannnnggcaaacggtatgtccggtgcnggaggatttcttggcagcattggtgactggctgggcggngcggnnnnnnntgcaaaaggnngcgtgtatacctnnnnnnncctgagcgcgtacagcaacagcattgtggacacgcccacgtactttnnnntnnnnnnnngggccgggctgatgggggaagccggaccnnnnnnnnnnnnnnnnnnnnnnngggcggcggatnnctcgctgggcgtacgnnccnnngnnagtatgaacggcagtgctggtctggtgtattccccggtctannnnnnnnnnnntcagaatgacggggctaacggacagatagggccggaggcggcaggcagtnnnnnnnnnnnnnttgaccagcgggtgcaggcggtgatgctgtccatgcgacgtgacggaggaatnnnnnnnnnnnnnnnnnnnnnnnnnnnnnnnnnnnnnnnnnnnnnnnntgcaggtgagtgagaagccgtcggtggtgagggtgcggtttggtgacggnnnngnnnnnnnnnnnnnnnnnnnnnnnnnnnnnnnnnnnnnnnnnnnnnnnnnnnnnnnnnnnnnnnnnnnnnnnnnnnnnnnnnnnnnnnnnnnnnnnnnnnnnnnnnnnnnnnnnnnnnnnnataacgcccggtacagtgatttcagctgtacgattgancaggtggtgaactgatgcaggannnnnnnnnnnnnnnnnnnnnnnnnnnnnnnnnnnnnnnnnntggtgctctgggaaatygacctgacggnnnnnnnnnnnnnnnnnnnnnnnnnnnnnnnnnnnnnnnnnnnnnnncnctgacggtgtcsaatctgttcggtctggtcaccggaatggcggaggacctgcagagcctggtgggnnccacggtggtnngnngccgggtgtatgcccgttttctggatgcggtgaattttgtggcgggcaatccggaagcggacccggagcaggagctgagcgaccgctgggtggtggagcagatgtcagagctgacggccatgacggcctcgtttgtgctggcgacaccgaccgagacggacggggcgctgtttccyggtcgcatcatgctggcgaacacctgtatgtgggattaccggggmgatgaatgcggntatmacggtcckgcrgtggcggatgagttcgacaaccccaccacggatatccgtaaggacagatgcagcaagtgcatgcgcgggtgtgagatgcgcggcatggtgnntaattttggcggtttcctttnnattaataaactttcgcagtaaatccaatgacacagacagaatcagcgattctggcacacacccggcggtgtgtgcctgcggagtcgtgcggcttcgtggtgagaacgccggagggggagcggtatatcccttgtgtgaatatctctgcagagccggaggcgtattttcgtatcgcaccggaagactggctgcgggcagagatgcagggtgagattgtggcgctggtccacagccaccccggtggtctgccctggctgagcgaggccgaccggnggctgcagataaaaagtgcactgtnctggtggctggtctgccggggggaaattcataaattccgctgtgtgccacatctgacagganngcgctttgagcacggggtgacggactgttacacgctgttccgggatgcataccatctggcgggaattgatatgccggattttgagcgtgaggatgactggtggcgcaacggtcagaacctttacctggacaatatggcggtcacaggcttttaccgggtgcccctgtcctctgcacaggcgggcgatatcctgctgtgctgctttggcgcatcggtggccaatcatgccgccatttactgcggcaacggtgagctgcttcaccatctnccnnaacaactgagtaaacggganaggtattccgaaaaatggcaacgacgaacgcattcagcctggcgtcaccgccactggcacgtatctgccttcacggggatttacaacgatttggcccgccgcctcagcctgtatgtgaacacggcagcggaagccatccgtgccctgtcgatgcagatgcckggattccgccgtcagatgaacgaaggctggtaccagatacgtattgccggtgaggacacggcaccggaggcggtgtacgcccgtcttcacgaacagctgggtgagggaacgatcatccacattgtgccgcgactggccggggccggaaaaggtggactgcagattgtgctgggggcggcagccatcgtgggctctttcttcactgccggggcatcaatggcgttatggggttcagccctggcagccggtggtttttctgccaccacgatgctgttttcactgggggccagcatgatactgggtggtgtggctcagatgctkgccccgaaggctaaagtaccggagtacaaaagcacggataacggtaaacagaacacgtacttttcgtcactggacaatatgattgcccagggtaacccgatgccggtgccttacggggaaatgctggttggctcccggcgaatctctcaggacatcagtacccgtgatgaaggcggtggcgggaaggtcgtggttatcgggcggcagaggtaaaaagaataaaaaaatcccgcagtgttgcggagctgcgggagagttacgaagattaactatagagaattattcttatgtcacgacaaaaaacattaacgcagagaaattattagtaccacagtcagtttgtgaaaatgtgaagatattcagaanttttattcagtgatgatacaggcatcctccgggatgcctgttgtttttgtgcgtaacagttatcacagtaaagggtgagacaatgggcaaaggtggcgnnaggcgcacacgccggttgaggcaaaggacaatcttaagtccacgcagatgatgagcgtgattgatgccattggtgaagggccgattgaaggtccggtgaagggrctgcagagtattctggtgaacaaaaccccgctgacggacactgacggnaatcctgtgatacayggtgtgacmgcggtctggcgcgccggggagcaggagcagacaccaccygaaggctttgagtcctccggggcggaaaccgcactgggcgtggaagtgacgaaggcaaagccggtgacgcgcaccattacatccgcgaacattgaccgcctgcgggtcaccttcggggtgcagtcactggtgcagaccacgtcaaagggtgaccgaaacccgacatccgtccgcctgctgattcagttacagcgtaacggtaactgggtgacggaaaaggatgtcaccattaacggcaagaccacctcgcagtttctggcgtcggtgattctggataatctgcctccccgtccttttaacatccggatggtccgggagacagcggacagcacctcggaccagctgcagaataagacgctctggtcgtcatacaccgaaatcatcgatgtgaaacagtgctacccgaacacggcgattgtggggctgcaggtggatgcggagcagtttggcggtcagcagatgacggtgaactaccatatccgaggtcgcatcatcctggtgccgtcaaactatgacccggaaaaacgcacttacagcggyatctgggacggcagcctgaaaccggcatacagcaacaacccggcctggtgcctgtgggacatgctgactcacccgcgctacggcatgggaaaacgtctgggggnggcggatgtggacaagtgggcgctgtatgccatcgggcagtactgcgaccagacggtcccggatggtttcgggggcacagagccgcggatgacctttaatgcgtacctgtcacaacagcgtaaggcgtgggacgttctcagtgatttctgctcggcgatgcgctgtatgccggtatggaacggccagacgctgacgttcgttcaggaccgcccgtcggatgtggtgtggccgtacaccaactgcgatgtggtggtggatgataacggcgtggggtttcnctacagcttcagcgccctgaaggaccgccacacggcggtggaggtgaattacaccgacccgcanaannnnnggcagacctccacggaactggtggaagacccggaagccatactgcgctacgggcgcaacctgctgaagatggatgcgttcggttgcaccagtcgcggtcaggcccaccgtgccgggctgtgggtgataaagaccggactgctggaaacgcagacggtggatttcacgctcgggtcacaggggctgcgtcacacccccggtgacatcattgaaatctgtgataacgactacgccggtaccatgaccggcggacgtgtcctgtccatcgatgccgccagccgcaccctgacactggaccgtgaggtgaccctgccggagacaggtgccgccacggtgaacctgattaacggcagcggtaannnnnnnnnnnnnnncatcactgcacaccccgcgccggaccggatacaggtcagcaccctgcctgatggtgtggagacatacggtgtatggggactctccctgccgtcactgcgtcgtcgcctgttccgctgtgtttccatccgggaaaacacggacggcacctttgccatcacggcggtgcagcacgtaccggaaaaagaagccatcgtggataacggggcgcactttgacggcgaccagagcggcacggtgaacggggtcacgccgccagcggtgcagcacctgaccgcagaagtcaccgcagacagcggggaatatcaggtgctggcgcgctgggacacgccgaaggtggtgaagggggtgagttttatgcttcgcctgaccgtggccgcggatgacggcagtgagcggctggtcagcacggcccggacgacggaaaccacataccgcttcacgcaactggcgctggggaactacaggctgacagtccgggcggtaaatgcgtggggacagcagggcgatccggcatcggtatcgttccggattgccgcaccggcagcgccgtcacagattgagctgacrccgggctattttcagataactgccacgccgcatcttgcggtttatgatccgacggtacagtttgagttctggttntcggaaacgcggattaccgatatcaggcaggttgaaaccacagcccgctaccttggcacggggctgtactggatagccgccagtatcaatatcaaaccgggccatgattattacttttatatccgcagtgtgaacaccgttggcaaatcggcattcgtggaggccgtcggtcgggcgagcgatgatgcagaaggttacctggattttttcaaaggcaagataaccgaatcycatctcggcaaggagytgctggaaaaagtcgasctgacggaggataacgccagcaaactggaggagttttcgaaagagtggcaggacgctaacgataagtggaatgccatgtggggcgtcaaaattgagcagaccaaagacggcaaacattatgtcgcgggtattggcctcagcatggaggacacggaagnaggcaanctgagccagtttctggttgccgctaaccgtatcgcgtttattgacccggcaaacgggaatgaaacgccgatgtttgtggcgcagggcaatcagatattyatgaacgacgtgttcctgaagcgcctgacggccccsaccattaccagtggtggaaatccaccggcattttccctgacatcagacggaaagctgaccgctaaaaatgcggatatcagtggcagtgtgaatgcgaackccgggacgctcaacaatgtcacggtaaatgaaaactgtacgattaagggcatgctggaggcgactcaggtcagaggtgacttcgttaaagctgtatccaaatcattcccgaaacaggctggtacgtggggtaacacggaaacaccaaacgggacggttacagtcaccatcagygatgatcataactttgaccgtcaaatcattattccgcccattatctttaacggaatagcgtatagctatccgggaagtggtaataacccgggaggtacaagttacacgggttatggttttgaagttcgcaaaaacggtgtatnnatcgcatccagagaaactaaaggggccattcccggtagttacagtgcagttattgatatgtctagtggtggtggtagcgtcactctggagtttaagattttccagaaaggcaatcagggggcaggcnnnnnnnnnnnnnnnacggtgattgtgaccaaaaaagcggcttccggcatcagtattcgttgaaatatnnataaccccaataanngnnntcagnnnnnnnncctnttnnattgcagaaaagcgagaggtaattatgcgtaaastttgtgcagccattttgtccgcagccatntgtctgkccgtatccggtgcgcctgcatgggcgtctgaacatcagtccacrctgagcgcggggtatcttcatgyccggacgaacgyncccggcagtgatgatctgaacggnattaacgtgaaataccgttatgagtttacggannnnnnnnnnntnnttacgtccttcagttatgccnnnnnnnnnnnnnnnnnnnnnnnnngnnacagcgatacccgctggcatgaagattccgtncgtaaccgctggttcagcgtgatggcggggccgtctgtgcgcgtgaatgaatggttcagcgcgtatgcgatggcgggtgtggcttacagccgtgtgtcgactttctccggggattatctccgcgtaactgacaacaaggggaaaacgcacgaygtkctgaccggaagtgatgacggtcgccacagcaacacgtctctggcgtggggagctggcgtgcagtttaacccgancgaatccgtggccattgatattgcttatgaaggctccggcagtggcgactggcgcactgacggtttcatcgtgggtgtcggttataanttctgattagccaggtaacacagtgttatgacagcccgccggttcaggcnggctnttttgtggggtgaatatggcagtaaagatttcaggtgtactgaaagacggcacaggaaaaccggtacagaactgcaccattcaactgaaagccagacgtaacagtaccacngtggtggtgaacacgctggcctcngaaaatccggatgaagccgggcgttacagcatggacgttgagtacggtcagtacagcgttattctgttggtggarggattcccgccgtcacatgccgggaccatcaccgtgtatgaagattctcaanccggtacgctgaatgattttctcggtgccatgacggaggatgatgcccgtccggaggcaytgcgtcgttttgaactgatggtggaagaggtggcgcgtaacgcgtccgcagtggcacagaacacggcagccgcgaataagtcagccagtgatgccagcacatctgccagtgaggcggcaacccatgcgactgatgctgcannnncagcannnnnnnnnnnnnnnnnnnnnnnnnnnnnnnnnnnnncggctcagtcagcgtcttccagcgcaggaacggcatcaacaaaggccactgaagcctcaaaaagtgctgccgctgcagagtcctcaaaaagtgcggcggctaccagtgccggtgcggcgaaaacgtcagaaacgaatgcggcagcgtcagaacaatcagccgccacttctgcatccaccgcgaccacgaaagcgtcagatgctgccacctcagccagggatgcgtcggcttcaaaagaggcggcaaaatcatcagaaacgaacgcancctcgagcgccagtnnnnnagcttcctcggcaannnnnnnnnnnnnnnnnnnnnnnnnnnnnnnnnnnnnnnngccagtgcagcgtcaacaagtgccgggcaggcctcagccagtgnnnnnnnnnnnnnnnnnnnnnnnnnnnnnnnnnnnnnnnnntccgcttcaacagccacaacgaaggctggcgaagccactgaacaggccagcgcagcagcgaggtctgcttccgcagcgaagacatccgagacgaacgcgaaagcgtcggaaaccagcgcagaatcctcaaaaacggctgccgcatcgtcagccagttcggcggcgtcatcggcatcatctgcgtctgcttcaaaagatgaggcgaccagacaagcgtcagcagcgaagggcagcgccacgacggcatccacgaaggcgacagaggcagctggcagtgcgacggcggcagcacagagcaaaagtanngcggaatctgcagcaacgcgcgccgagacagcggcaaaacgggcagaggatattgcatccgccgtggcgcttgaggatgcgagcacgacgaaaaaggggatagtacagctcagcagtgcgactaacagcacttccgagtcactggcggcaacgccaaaagccgttaaggccgcgtatgagctggctaacgggaaatacaccgcacaggatgcaacgacagcacagaaagggatagttcagcttagcaacgcgaccaacagcacatctgaaatgctggcggcaacgccaaagtcggtaaaggcagcctatgaccttgctaacgggaaatatactgctcaggacgctacgacagcacaaaaaggaattgtccagctcagtagtgcaaccaacagcgcatctgaaacgcttgccgcgacaccgaaagcnnnnnaagcagctaatgataatgcgaatggtcgggtaccttctgcccgtaaggtgaatggtaaggcgctttcagcggatataacactgacgccgaaagatattggtacgcttaactcaacaacaatgtcattcagcggtggtgctggttggttcaaattagcaacggtaaccatgccacaggcgagttctgttgtttcaattacgttgattggtggcgcgggatttaacgtggggtcacctcaacaggcaggtatatctgaacttgttttgcgtgcaggtaatggtaatccgaaggggattactggtgctttatggcagcgcacatcgacagggtttacaaattttgcctgggtcaatacatctggtgatacttacgatatttacgttgcaatcggaaattatgcgactggtgtaaatattcaatgggattataccagtaatgccagcgtgacgattcatacgtcaccagcatattctgctaataagccggaagggttaacggacggtacagtttattcactctatacgccatcagggcagttttatccgcctggcgcaccaatcccgtggccatcagataccgttccgtctggttatgccctgatgcaggggcagacttttgacaaatctgcttacccgaaactcgcagccgcttatccgtcaggcgtgatccctgatatgcgtggctggacgattaagggcaaacctgccagtggtcgtgccgtattgtctcaggaacaggacggcattaaatcgcacacccacagcgccagcgcatccagtacggatttggggacgaaaaccacatcgtcgtttgattacggcactaaatccacgaataacaccggggcgcatacgcacagtgtgagcggtacagccgcaagtgccggaaaccatactcatagtgtcacaggcgcatcagcagtcagccagtggtcacaaaatgggtcagtacataaggtagtgtctgcggccagtgtgaatacaagtgctgcaggagcgcacactcatagtgtcagcggcacagccgcatctgcaggtgctcacgcacatactgtcggtattggtgctcatacgcactctgttgcgattggctcacatggacacaccatcaccgttaacgctgctggtaacgcggaaaacaccgtcaaaaacatcgcatttaactacattgtgaggcttgcataatggcattcagaatgagtgaacaaccacggaccataaaaatttataatctgctggccggaactaatgaatttattggtgaaggtgacgcatatattccgcctcatacaggtctgccagcaaacagtacctatattgcaccgccagatattcctgctggctttgtggccgttttcaacagtgatgagggatcgtggcatctcgttgaagaccatcggggaaaaaccgtctatgacgtggcttccggcgacgcgttatttatttctgaacttggcccattaccggaaaatgtcacctggttatccccggaaggggagtttcagaagtggaacggcacagcctgggtgaaagatgcagaagcagaaaaactgttccggatccgggaggcggaagaaacaaaaaacagcctgatgcaggtagccagtgagcatattgcgccacttcaggatgctgtagatctggaaatcgcaacggaggaagaaacctcattgctggaagcctggaaaaagtatcgggtgttgctgaaccgtgttgatacatcaactgcacctgatattgagtggcctacgaaccctgtcagggagtaatcattgggattatgccgcagcacgtcttaagcaagaacgtgctgcggttggatgctattttttccctgaagcggaaaacattactacagtaccttgaaccttggttttaacattctcgaaatgctctgagagtatatgtgttaagccttcttcggaatcttttgtgtttgaaaagatgcctttctgattgtaaatgcgcatcagtttttgaccgaagctattgtgcacaactccatcgccaagaattgtggctccgtatagagttccatcgtcagttaaggcctgcgcagcattgcgtattacacagctttttgtagatatatttccaggcaggcagtgaagaaggtaaaacatggaaatggaatcaaattgaccatgtaacgccgcgggataaggttcaaaaacatcatggctaattttatgtttaatttttgattccccagcccttgtagatgccgcgttcaggctagcttcgttcaaatccattaaagatatcagactactctcaggtacgtgagtaaggtaaaacccagttccaacaccaatatccagatggttgttacctaaatgttccagaaagtgtggaaggaggtgttcctttgtaggacatccccatgcaagccgatttgatactcccaaaacccaccagtcataaagctttagggtaagtggtgtgtaaattttagccccatcatctgtgttttttttcattaatttcaccatgttatagttttatttgtgaattaaatcaattatggcgatgaattacaaggggttaaatgctgccgcagcatagcgatattgaaatagcctggtatgcttcgatacagcaggagccgaatggctggaagaccgtcaccacacagttctacatccaggagttcagtgagtatattgcgccactgcaggatgctgtagatctggaaatcgcaacggaggaagaaagatcgttgctggaggcatggaataaatatcgggtattgttgaatcgtgttgatacatcagtagctctgggtatgaagctgattgtaactcatgttacagtaacggttattgctatctcgaaggtgcaaaatgtatattgatttgatattttataaatttacttcgaatctggcacgtcaacttttgattaaagtaatatcagttttcggcgaaaaaagaccgtgtacatgagacgatttcatacaagaataaccaaaatatgaatatgctcccaatgcaatatatgttttgcattgggagcaaatagcggaatattttgaaattattgtatttctgcttcagaatttcctgggcagtatatattttctattttttgtggagtgatcaggtgatgtacaattgctttatctacacataaattaactccggtggagagctaatgtatgcccatcaccatttattgttagtaacgggctggaaaatttctctgccatcttacgggcattaatccagggcgttgttgggtcgtatttgtgtgctacaaacagtaaaccagagggcagaacagtatttttcaggcgagttttgttcaggtcgctatgtattggccataattcacaaaaatcaggtgaatcggaacgtccattgtcaaagttaatagccgggaaggcattcgcaagagcgtcttttcgggattttcgctcttctggtgttaattgctcatccccctgatctacacaaaggattacccccgaagcatcacttgactcttctgaggctatcggagcactgagcgcagtttcaatttcattactgacaatcccctgagagaactggcgtatggcagttgcaagggttggccatgatgaacgccatagcagaaggtctgttgttaatgatatgagttcatctgaagatatattttctcccttactgtctaataaaggtttgtgatgtaattttaataatagctcatggaactgagttattgccttatctctgtctgaagaaagcgggcaactttttgtacgcgcacaccaggatgcaaagcgatcaaacgtttcctgataactctgtgcctgtttgagttgccatgtgaagttgtcctccaggtcatcgatatcgacgactccatcaagaacgatagatcttatgttgtagggaaaacgttctgcatataaggctgcaatttgagttccatacgaatacgccacggctgtcagttgtttatcccccaaggcttgcctaatacgatcaatatcgtatacagcctcgttagagccgatatggcgaatgacttcggctccggtattatggatacaggcattaattttatttaatacttgttgcttttcggttatgttttcctgagtctctgtatctgattgccggcagtttattgtcggagtggactgtccgacgcctcgaggatcaaatccaataatatcccatgactcacgaagatttgtgactggccagtcaaagttaatataaggatttatgcctggtaacccgggaccaccacttattatcaggatacttcctttatgcttgctttnnnnnngcaattttgtcaacgctagtttgacttgtgattttttttcataagaagcatctccgcctgtgtctgtatattttaatggaacagacaaataaccacatagtaagtcaggagacggtttttcctcaccaaaccagtggttgaattgactggccatacaggattgccactgtatctgctgggcagatacggttactggtagaagtaacgttaaaacaactttgaaatgagtaattnnnnnnnnnnnngtgtctctgaatatcggaataaagataaaatttgaatatattgaggtcttgtgttgcggtaagagattacacgttatgacataggttaaatgcttacaaaattagtggatattgtctacttgtaactgtaaacaaattccccggggttatacaataccaccggggagaaaatctggttaacttcgttaaaaggtgtacttaagaccagcagtagtgatgaagttatagttttctatgcctgcaccatttttgctgtagtctgaagtgttatcattgtgatcataaagtgaagtattaccttttttattcgtaacccgattccatgcgccttcaacataaacttttgcgttaggtgttacgtaataacctgcattgactgcaacagaatagtaattttggtctttgactttactgcgataagtgattctttttcctgggtcatagtgctcatcgttatcagatgcttccacccagccgctgtatttaaatgtgccacctagctcaaaatcttcataacgataacttccagtcaagccaatgtagggcattttaaaacgttgtttgtagccgattgctctttctccattcgggaaggagccgatatcatctctgaatccctcctcagaactgtagatataggaaccacctctggctgtaaagctataacggctttcctgatatccggccatgagtcccaggcggtaattgggttcgttgaggagccagcctttgatattcagatcaaattcgttggcataattgagttgtgtatcagggtgtctactttcatccgtccaggttccggggttactggaatccatccagtcctgatcgaccatattgccacctcggctgccgagagttgtccagccagcagccccgatagatatctggggcatcaaatcccaattnattgcacctttaataattgcagcgttattgaatttccagtcgagttgactgacttttcggcctccttcttcggctagataaacacgctcttttgtttttccgctcagagttccaagactaatgtccgcatttatgttgtcaggagtaaacgataaagtctcggtagaagcaaaagagctgatcgcaataggggttgtcaggattattcccagaagtttcgcccgcataaaaggtctccattcaatcgttttaatgattgaatatgtattttttatatctaacttaatgagtcaattgtatattgtttaactgtttatagtttgtttaagtttgaattattgtttcgntttattcattctttatgggcaacttgcnnagtnnnnnnnnnattgttgtggtttaatatgctggannttttctttttgctgatatttttatctgtctatagttattcatttatacgcanntnnnnaaaaaaaatattattttaggtatttctacagtacatttgacacgatgattaacctctatgtagctaggtttttgtaaagaaactgtgcgtcactgtatccaggactgttatgtgccaaataaggaagttgaagttaccagctcttactctaaagctattacgtatagaaaaaatgcatttgagacgtgtaaaatcatttatttaatcgcaatttatgtaatggcataatcaggtcggtgaaagaggggagaagaatggataaaagagctaaaaatcagatagtcgatagcgatattgcacgtttgttactcaagctcagaaagtctcgaaacttgactgttacagagcttgcccaacgatctggtgtcagtcaggcgatgatcagcaaagttgaacgaggcacttcaagccccagtgcaacaatacttagtcggttagctaatgcactgaatattacgctatcaaagctttttgcagagcttgagatgcaacagaattcacttgtacttttggctgaccagcaacaacattggattgatgaagaaacaggcattacccgctggtctttnnnnnnnnnnnnnnnnnnnnnnnnnnnnnnnnnnnnnnnnnnnnnnntgnngcgggtgccgggtttgagcagacgctgaccggaatgacagtggggatcgacagccgtaatgatattcctgaggggattgcgacgctgggcgcttttatgggttattcccattcacatatcggttttgatcgtggaggacatggcagtgtggacagttattctctgggcggctatgccagttgggaacatgaaagtggtttctatctggacggtgtcgtgaagctgaaccgttttgaaagtaacgtagccggtaaaatgagcagcggtggagccgccaatggcagttaccatagcaacgggctgggcggtcacattgaaaccgggatgcgatttaccgatggtaactggaacctgacgccgtatgcctcgttaacggggttcancgctgataaccccgaatatcatttatccaatggcatggaatcgaaatcagtcgatacccgcagtatatatcgtgaactgggtgcaacgctgagttacaacatgcgtctggggaacggtatggaagttgagccgtggctgaaggcggctgtgcgcaaagaatttgtcgatgataaccgggtgaaagtgaatagtgacggtaatttcgtcaatgatttgtcgggcagacgtggaatataccaggcaggtattaaagcctcattcagcagtacgttaagcgggcatcttggggtggggtatagcaacggtgctggtatggaatccccgtggaacgcggtggctggtgtgaactggtcgttctgaccatcaacgattaaactgcgctnnnnnncagttttcgtttacaggatgttaaaagagaaaattctggggtaaaaaaagcccgccagttacggcgggaaacctcatcctatgggagaacaatgaataatgaaattgcggggttatcatctcccagtatatcaacactaacaataaggttatttactcaaccaggcataaatattttgttttgtgcgtgggaacagccttaaggtgtaaagggggaggtggaaatagcaatgaggagtatcagcaagaatactcgccgctttaccacaacgtggatgagagggatgaaaaactcaaggcagagataactctgccttgaagataaatgcgcttttacagcgggattatttcagctcttctgcttccggtaaggtcacgttcagctcaagaatagaaatatcgccatctttttgctcaagctgtacggttaccatctcaggatcaatttgtacgtatttacaaatgacctcaagaatatctttacgcaactgcggcagataatgcggttctgcatcgctgcgacggcgttcagcaacaataatctgcagccgttcttttgcaatgttggctgtatttttcttccgcgagagaaagaaatcgagtaatgccataacttatcctccgaacaagcgtttgaggaagcctttcttctcnncttcaatgaagcggaaaggacgttcttctcccaacagacgttctacggtatctgcgtaggctttacccgcatcggcgttaatgtcgagaatgaccggttcaccctggttagaggcgcgcaatactgattgatcctctgggatcacgccgacgagtttgatgcgcaggatctccagcacatcttccatgctcagcatgtcacctctgcttacgcggcctgggttatagcgcgttaacagcaggtgctctttaataggctcttcgccattttctgcgcggcgtgannttgacgccagaatgcctaaaatacggtcagagtcgcgtactgaggagacttccgggttggtggtaataatggcttcgtctgcaaaatagagtgccattaacgcaccggtttcaatccctgccggggagtcacaaacgataaattcaaaatccatcgctttcagatcatcaagaactttagcgaccccttcacgggtgagggcatctttatcgcgtgtttgcgatgccggcagaatatagagattttcagtacgcttatctttaattaacgcctgatttagcgttgcatcgccctgaatgacgttgacgaaatcgtaaacgacccggcgttcacaacccataatcaggtcgagattacgcaggccgatatcaaaatctatcacgacagttttctttcccttctgggccaaaccagtggcgatggccgcgctggaggttgtcttaccaacaccccctttgcccgaagtaacaacaataatgcgtgccatanaaattccttgttaaaaagggatcaatttaacggttgaacggtcaaagcgttttcgactaactgcagtcgcgccgctttgccataaaattctgctgggatttgatcactcagccagtattcacctgcgatggacaccaattccgccatcaggttcgtacaaaatatttgcgtttcccggtcaccacttgcccctgccagcgcacgaccgcgcatcatgccatagacatgaatgttcccatcggcaatcaattcggccccagcgctaacgtggcttgtaacaatcagatcacattgtggagcataaatacgctgaccggaacgcaccggggtatctattaaacgcgtttttgtgaccggcgttgtattttgcgctggagcctgcggtgcgggagctggacgtggcgctttttcctttccttccgtcaggataggcagccccattttttcaatttcggctttaagttgcgcatctttgcagccacttacgccaataacccgcaaaccggttgccgaaaccgccttatgcatcgctgaccagtttaccgggtcttccagtgcactgacgttgagtacaacgggggcatgttttaaaaatgcgggggcctgagcgattttgtcttccagcgcctgatggataaccttaggttctgcctcatgcagatgaaccacagataaagtgaagctactgcctttaagctcgattggcgtgtttgacatcctggccttactcaattagctattaatcatcgccagcgcgcgatgatgttccgaagactataaggcatgttatagtctggattatattgaggcaagtcaccctcccatttattcagagtaaaagtctattctgtgataaatggcgctgattcatagcttaaaaaatacccttgtcaatcaacccattgccgtcgtacttttgattcttcttatttacgcttcctttttccgcaccctaatcgtgacagcatctccagacctgtttaaatatccagtattgaggcaagtgtattttttcaccacgccaggctttcttaactttccattttttgcagcatcattaaagaacagatacccgttatcttaatatccgccacagaattgctctatcatagaaaccgcagaagacgtctgatacttctgtcaggtcatcgtaactcgtccaggtcagcggttttgattacggattgatgatgaaatgagcataagtgttgtacggttggattatcaggatgtgctatgaatatgatgcgtattttttatatcggattgtcaggtgtggggatgatgttctcatcaatggcgtctggacatgacgctggcggacttcaatctccggcgtgcggcgttgtttgcgacccgtatatttgtgtgaactcagatggcatttccccagagttaacaaggaaatatctcagcgaaaaagccgctgaaaacttacaatcattacaaggctacgatcccagcgaatttacattcgctaacggtgtattttgcgatgttaaagaaaaattatgccgtgatgatcgttattttggtgtagatggtaagcggagtggaaaaatcaatcaaaccaccacaaagatgttatttatgtgtcgtgagtgatgtcttgtttacattatgttctattcgtcattaacctcttgagcgacagagaggagtggggcgtcaacgtttatgacggggagactccccgtcggttgacatttacttaatttgaatatcgacgttatattttttagttttgtttttacgggcgtcgtttcgggtttgcagcactcgcagctcatatttgccagaagcagggagtgagtattgtccgtgactatcgagttcaggggaatatctggataaatcaacagaatcatcgattcctggcccgaagaggtaagtatcagcgccttcattagagatactcacatgcactttctgaccttttttggcatagaaggtatatgtatcgtaatcgtatccctttatttcgccggagtactgagcgctgctatggccttttctgaactcaacattgacattcttacccgcagcaaagctcgtggaggttagcagtgcaagcagcaatacagccttactgatgctcttgattttcattggtagtctcctgttcagaatgagtacgatgaactgttataatataacaatcccttacgggagaattccagtggctttcctgcgttcggtaaaatcccgtcgcggcatttttgccggggggattacttataaagggggcatggactcaacaaaccgtagaaatttacagctggctggcttgtggcgcgggtttcattgatgttagcttatgccaaaacctggcatcttaaagagtaaaagtatgttttgtgtgatttatcgaagcagcaagcgtgaccagacctatttatatgtcgaaaaaaaagacgatttttcgcgtgttcctgaggaactgatgaaaggttttggtcagcctcagttagcgatgattctgccgctggatgggcggaagaaactggtcaatgccgatattgaaaaggttaaacaggcattaaccgagcaaggttactatttgcagttaccgccaccacccgaagatttgctgaagcaacatctttccgtcatggggcagaaaacagacgacactaacaaataaccgatatccggcggtggcattatctttgtcggcgcgggttttcatatccacgataaggtgaggggaacgttatgtatcaacatcacaactggcaaggtgcgctgctggattatccggtgagtaaagtagtttgtgttggcagtaactatgccaaacatattaaagagatgggcagcgcagtgcccgaagagccagtgctgtttattaaaccagaaacggcactgtgcgatctgcggcagccattggcgatcccatccgatttcggttcagttcatcatgaagtcgaactagcggtgttgattggcgcgacgctgcgtcaggctacggaagagcatgtccgcaaagccattgccggttacggcgtggcgctcgatctgacgttgcgtgatgttcagggaaaaatgaagaaagccgggcagccgtgggaaaaggctaaagcgtttgataactcttgtccgctttccgggtttnnnnccgcggcggaattcaccggcgatccgcaaaatacaacgctgggcctgagcgtaaacggcgaacaacgccagcaaggtacgactgcggacatgatccataaaatcgttccgctgatcgcttatatgagcaagttttttaccctcaaggccggtgacgttgtgctgacaggcacgcctgatggcgtcggcccgttgcaaagcggtgatgagctgacagtcactttcgatgggcattctttgacaactcgcgttttgtaatactttttgccgcctgaaanngnnggcaaaacttgcatcgctgtgccagactggttataaggtgcgttttaacgtaatggcggaacacctgatgagcgatgtacctttctggcaaagtaaaaccctggacgaaatgagcgatgcggaatgggagtcgttgtgtgatggttgcggtcagtgttgcctgcataaactgatggatgaagacaccgacgaaatctacttcactaacgtcgcctgtcgccagctcaatattaaaacctgtcaatgtcggaactacgaacgtcgtttcgagtttgaacccgactgcattaaattaacccgtgaaaatctgccaacattcgaatggctaccaatgacctgcgcttatcgtttgctggcggaaggtaaagatttacctgcgtggcatccgctgcttactggttcgaaagcggcaatgcatggtgaacgtatctctgtgcgtcatatcgcagtgaaagaatcagaagtgattgactggcaggatcatatcttaaataaacctgactgggcgcagtgataaatttaatagatgttgatgggggctttcttaatatacgtctggatgctcgccatttcgtagccctgtttttgaaagcgctctgtcataatgagagttacccgataccttattatcaacaggtaactctcaatctttaaaaaacgtctgtatttttaaatgtgataaactttataccttgagtacatggagagaataattgctgatcagacttcaggtacctcaaagagtgtcttcttaccgtgtcttttctgatactcattacaggtgttaatcattttattggccgcttcttttagcaaagaaagcattaaatcatcataatcaacatagaatctggttgtttcagtttccgtttttatctccccgatggcggctatttcggtggttaatttcaatttggcggcatcgatatctttattcgcttgtttaaccgtgttagacagggtggtaaagaaactctgcacagattttaacttgttcttcaattctggaatcagtttcccttcaactacgcccgcagcaatagaataggaaatgattaaaccaaatggaccggcgacgacaccggctgcggcaccggcatacgcttccttcctgattttatctacctgtgactggaaatagctgcttttttctgaaaaatcattggttaactggctatctaacgccagcagtttcccggaagcgttgttgaaactttgtgagcttaccagcagggatttttgcgcttcattcagcttcgtgatgccgtcatccagtaacttaatgagaatgtctttctgggcggatgctttcttctcattatactcatcaaatagcaaaatatacgctgcgagcaattgcgtcgcaacaccacaccattcatacactgtttgggttgcttcaaaatacttatcctggctatccattagtaaggttttaatattgccaactaaaacggaggctgcctgtgaatactcctgtttaaagcgacttaactcttttatggtttcatcaaaggtctgccaggggatgacctgatcgagatatttattataaagatccaatgctccatctgcggtttcgattgcgtttttaactacctctaccgttttatctgcaacgatttcagtcataatcattcgcctctttaaatatataaantgtaatgaaactcctgttttacaactattaatgaattttacttcatctaattcatagttagccgggagagatgcgtcaatgtctttatttctattaatatgataaatatcaaacaatgtttaatgtcattatggcgaatgcttctattctattttttagccgggtgatatttttcatttctgctggatgagcgtcgtcgccagaaggccgcgtgagcacaggataagagaacgaaaaatcagcagtctatgcagcgacaaatattgatagcctgaatcagtattgatctgctggcaagaacagactactgtatataaaaacagnataacttcaggcagattattatgttgtttatcaagcctgcggatctccgcgaaattgtgacttttccgctatttagcgatcttgttcagtgtggctttccttcaccggccgcagattacgttgaacagcgcatcgatctgaatcaactgttgatccagcatcccagcgcgacttacttcgtcaaagcaagtggtgattctatgattgatggtggaattagtgacggtgatttactgattgtcgatagcgctattaccgccagccatggtgatattgtcatcgctgctgttgacggcgagtttacggtgaaaaaattgcaactacgcccgacggtacagcttattcccatgaacagcgcgtactcgcccattaccatcagtagtgaagatacgctggatgtctttggtgtggtgatccacgtcgttaaggcgatgcgctgatgtttgccctctgtgatgtaaacgcgttttatgccagctgtgagacggtgtttcgccctgagttatggggtaaaccggtggttgtgctatcgaataatgacggttgcgttatcgcccgaaacgctgaggcaaaggcgcttggcgttaaaatgggcgatccctggttcaaacaaaaagatctgtttcgtcgctgtggcgtggtttgctttagcagcaattatgagctttacgcagacatgagcaatcgggtgatgtcgacgctggaagaactatcgccccgcgtcgagatttacagtattgatgaggcattctgcgatctgacaggtgtgcgtaattgtcgcgatctgactgactttggcagagaaattcgcgcaacggtgctacaacgtacccatcttactgttggtgtggggatcgcccagaccaaaacgctggctaagcttgccaatcatgcggcaaaaaaatggcagcggcagacgggtggggtggtggatttatcaaatctgnnnnnnnagcgtaaattaatgtctgctctccccgtggatgacgtctgggggattggacggcggatcagcaaaaaactggacgcgatggggatcaaaaccgttctcgatttggcggatacagatatccggtttatccgtaaacattttaatgtcgtgctcgaaagaacggtgcgtgaactgcgcggtgaaccctgtttgcaactggaagaatttgcaccgacaaagcaggaaattatctgttcccgctcgtttggtgaacgcatcacggattatacgtcgatgcggcaggccatttgtagttacgctgcccgggcggcggaaaaacttcgcagtgagcatcaatattgtcggtttatctccacatttattaagacgtcaccatttgcgctcaatgaaccttattacggcaatagcgcgtcggtaaaactgctgacgcccactcaggacagcagggatatcattaacgccgctacgcgatctctggatgccatctggcaagcgggccatcgctaccaaaaagcgggcgtgatgctgggggatttcttcagtcagggagtcgcgcagctcaatttattcgatgacaacgctccgcgccccgggagtgagcaattgatggcggtaatggatacactgaatgctaaagagggcagaggaacactctattttgccgggcaggggatccagcaacaatggcagatgaagcgagccatgctttcaccacgttatacaacgcgaagttctgatttactgcgggtcaaataaacacagcggcaggaaaaaagcgctcccgcaggagcgccgaatggattagcgaccgaacaggtcacgttttttcgctttaaacggctgggaaatcaccaccagcnccgcgacaatcaggtaagcgataaaaataccgagcagccactgcggcatttccagacctaaaaaatcccactgacgctcggcgcaatcgccagaggcgacaaacacttgcggcacccatttatccagcggcagccattccgggaaacgaaccataaaatcacaggtggcaaacggcgaaggatagagctgaagcatggtgtgctcgtaagttaactgcacaccgcggaacgcactatacaaccagataaccatcgctacataacgcagtggcgtttttggggcgatcgcgccaatcagcgcagcacccagaacgccgaataatgcgcagcgttcataaatacagagcacgcaaggtttcagtaacatcacatgctggaaccacagcgccgtcagttccagtgccagagcagtaaacgccatcaacagccacgcgccccggccttgtgaacattggttcaaaaatcgtaacataatcatttccctgcaatatgcatagagtgcgcagtttaaaccaattcattcgctgcgccaccaggaggcagcaaaaataggacgcaattggacaattatcgggcgaaaaggcaaaccgggcatttatatgcccggtaagttgttatcaaagcgttgctatccagcccatttgcataaaccattcggttacaggggcaagcgtaaactcgacgcagagcagtccgacgagtgtcaggacgagggtgtaaggcagggccatccacaccatgcggccataagagaggcgaatcaatggcgcgagtgcagaggtcagcaggaacaggaacgcagcctgaccgttcggcgtagcgacagagggcagattggtaccggtattaatggcgaccgccagcagctcgtattgcttcaacgtgatagcgccactttccattgccgctttcgcttcgttgatataaatcgtccccacgaagacgttatccgaaatggatgacagcagaccgttgaaaatatagaacagcgacagctgagcatgttccgatgcctgcaacacaaactgaataatcggcgaaaacagttgttggtcgataatcaccgcgactaccgagaaaaacaccgtcaacagtgcggtgaatggcaganattcggtgaaggctttaccgatagcatgttcatcggtgacaccggtcaatgatgttgccagaataatgactgacaaaccaatcaagccaacttccgccagatgcaacgccagcgcagtcaccagccagacgccaataatcgcctggacaatcagacggattttatcctgacgggtacgctggtggcggctttgatcgtcaaactgttgcaacacttcgcggactttctccggcagcgtttcaccgtagccaaaccaacgcagcttctctaccagcaggcaggttaacaggccacaaatcagaaccggaacggtcaccggcgacntgcgcaggaagaaatcgccaaaatgccagccagccgctttagcgatgatcaggttctgtggttcgcccaccatggtcattacgccgcctaatgcggtgccgacaccggcatgcatcatcaggctacgcagaaagccacggaactgttccagaaccactttgtaatgcttgtcgatatgactatcgtcttgcaggtcggtgtcttcggtacgggaagaggctacgcgatgataaataccataaaaaccgacggcaacgctgatcaccaccgccacgacggttaaggcatcgaggaacgcggagaggaacgctgccgccacgcaaaaagagagcgacagcagcattttggagcgaatgcttaacagcaaacgggtaaatatgaacagcaatagctgtttcataaaatagatacccgccaccataaacatcagtaacagcaagacttcaagatttgccgccacctcttcacggacgtgttccgcgctggtcatgccgatgaataccgcttcgatagccaacaggccaccggggagcagcgggtagcatttcagggccatcgccagagtgaaaataaattccgctaccagcaaccagccagcgacgaaagggctgatgaggaaaattaacggatttacgattaagaaaatgatgagggcgagtttgtaccagtcgggggactggcccaaaaaattgnnnnnnnnnncgcggccccaggagatctccatgatggtttcccttaccttacaaataatcaatgatgtttttatgtttaaacgcaaagcttaacggtcaggcaggagtgaggcaagtcttgatagtcaaggggaaagagatgcggaaaatgaagccttgatcccttttttcttctttttgtctgctatcagcgtagttagccctctggtatgatgagtccaactttgttttgctgtgttatggaaatctcactatggtcattaaggcgcaaagcccggcgggtttcgcggaagagtacattattgaaagtatctggaataaccgcttccctcccgggactattttgcccgcagaacgtgaactttcagaattaattggcgtaacgcgtactacgttacgtgaagtgttacagcgtctggcacgagatggctggttgaccattcaacatggcaagccgacgaaggtgaataatttctgggaaacctctggtttaaatatccttgaaacactggcgcgactggatcacgaaagtgtgccgcagcttattgataatttgctgtcggtgcgtaccaatatttcaactatttttattcgcaccgcgtttcgtcagcatcccgataaagcgcaggaagtgctggctaccgctaatgaagtggccgatcacgccgatgcctttgccgagctggattacaacatattccgcggcctggcgtttgcttccggcaacccgatttacggtctgatccttaacgggatgaagggactgtatacgcgcattggtcgtcactatttcgccaatccggaagcgcgcagtctggcgctgggcttctaccacaaactgtcggcgttgtgcagtgaaggcgcgcacgatcaggtgtacgaaacagtgcgtcgctatgggcatgagagtggcgagatttggcaccggatgcagaaaaatctgccgggtgatttagccattcaggggcgataatcccttccgtttaaaaaacaaacccctcaaacgaggggttttttgttgtttttacagatttcccattctcggcgggcaacgttccagcaactcgacgctgccgtcttcgttttgctgttccagcatcacatcaaatccccacaggcgatgcacatgcttcagtacttctttgcgcccccgatccagcggtgcgcgattatgtggaatgtaacgcagcgtcagcgaacggtcgccgcgcaaatccacgttccagatctgaatattcggctccagattacttaagttatattgcgacgatagccggttacggatctcccgataaccttcttcattatgaatagcggaaatctccagataattatgccgatcatcatccagcacggtgaagaagcggaaatcacgcatcactttcggcgacaggaactggctgataaaactctcatctttgaaatcacgcatcgcgaaatgcagcgtttccagccagtcggaaccggcgatatccgggaaccagtatttgtcttcttccgttggcgactgacaaatccgtttaatatcctggaacatggcgaacccgagggcatacgggttgatgccgctgtaccacgggctgttataggggggctggaagaccacattggtgtggctgtgcaaaaactccagcataaaacgttccgttactttcccttcatcatacagatggttaaggatggtgtagtgccagaaggtggcccagccttcgttcatcacctgagtctgtttttgcggataaaaatactggctcaccttacgcacaatacgcaggatttcacgctgccatgattccagcagtggcgcatttttctccataaaatagagcaggttttcttgtggttcggacggataacggcgcgcttcagcaaccgttttctcttcctcgcgcttcggcagggtacgccagagcatattgacctgactttgcaaatactcttcgcgacttttctgccgggctttctcttcttgcagcgagattttttgcgggcgtttgtaccggtccacgccgtagttcatcagcgcgtggcacgagtccagaagccgttctacttcatcaacgccataacgttcttcgcactcggtaatatatttacgggcaaaaatcagataatcgacaatcgaactggcgtcggtccagctacggaataagtaattgtttttgaagaaagagttatgcccatagcaggcatgagccatcaccagcgcttgcatggtaatggtgttctcttccatcaggtaagcgatacacgggttagagttaatgacgatttcataggccagtccttgctgaccgtgcttatacagccgttcagtctcgataaactttttaccgaatgaccagtgcggatagttaattggcatgccgacgctggagtaggcatccatcatctgttctgaggttatcacttcaatctggtgcgggtaggtatccagccggtagagtttcgccacccggtctatctctgccagataaacatccagcaggtcgaacgtccagtcgggtccatcgctcaaacgtgtggtgtccttattcatagaatcgatcgtcgccatacgcgcacctcattgttgtcggcgctctctgngtggagcanntcattgttgtcggcgctctctgtgtggagcacctcatttcaagcatagaacacctgttaaaaaccgcgtcgccggagaatttttttctttgcgatttcttattatcagagtgccactaatccgtttctgaacggaattttatgctggataaaaagggcgttcagcaggagatactaaagacgccatattgccgcagagtcagggagatgtgagccagctcaccataaaaaagccgtatgttgaataatattttcaactgagttatcaagatgtaattagattattattcttttactgtatctaccgttatcggagtggctatgcgagttgtcatactgggaagtggtgtggtaggcgttgccagcgcctggtacttaaatcaggcaggacatgaggtcaccgtcattgatcgggagccgggggccgccctggaaaccagtgccgcgaatgccgggcaaatctcccccggatatgctgcaccgtgggcggcaccaggtgtgcctttaaaagcgattaaatggatgttccagcgccatgcgccgctggcggttcgtctcgacggtacgcagttccagttgaaatggatgtggcaaatgttacgtaactgcgacaccagccactacatggaaaacaaagggcggatggtgcgtctggcggaatacagccgtgattgcctgaaagcattgcgcgccgaaaccaatattcagtatgaagggcgtcagggtgggacgctgcaactgttccgtaccgaacaacagtatgaaaatgcgacccgcgatatcgccgtgctggaagatgccggcgtaccgtatcagctgctggaatccagccgcctggcggaagtggagcccgcgctggcagaagtagcgcacaaactgatgggtggtctgcaattgcccaatgatgaaaccggagactgccagctgtttacccagaatctggcgcggatggcggagcaggcgggggttaaattccgctttaatacgcccgttgaccaactgctttgcgacggcgagcaaatctacggcgtgaagtgtggcgatgaagtgattaaggccgatgcgtatgtgatggcgtttggttcttactcgacggcgatgctcaaaggcattgttgatattccggtgtatccgctgaaaggctactcgctgaccattccaattgcgcaggaagatggtgcgccggtatccaccattcttgatgaaacctacaaaatcgccattacccgtttcgataaccgcattcgtgttggcggaatggcggaaattgttggttttaataccgagctgttgcaaccgcgtcgtgaaacgctggagatggtggttcgcgatctctatccacgcggcggtcatgtcgagcaggcgactttctggacgggtctgcgcccgatgacgccagacggcacgccggttgtcgggcgtacacgctttaaaaatctgtggctaaataccggtcacggcacgctcggctggacgatggcttgcggttccggtcagttgttaagcgatctgctctctggtcgcacgccagcgatcccatatgaggatctaagcgtagcgcgctacagccgtggatttacgccatcacgtccgggccatttacatggcgcacacagctaaggaaacgagatgacccgtccgatacaggccagcctcgatctgcaggcattaaaacagaatctgtccattgtccgccaggccgcgccgcacgcncgcgtctggtcggtggtaaaagcgaacgcttacgggcacggtattgagcgtatctggagcgcgctcggggctaccgatggctttgcattacttaacctggaagaagcaataacgttacgtgagcgcggctggaaaggaccgatcctgatgctggaaggatttttccatgctcaggatctggaaatgtatgaccagcaccgcctgaccacctgcgtacacagcaactggcagctcaaagcactgcaaaatgcgcggctaaaagcaccgttggatatttatcttaaagtgaacagtgggatgaatcggttgggcttccagcccgatcgcgtgcttaccgtctggcagcagttgcgggcgatggcgaatgttggcgaaatgaccctgatgtcgcattttgccgaggcggaacatcctgatggaatttccggcgcgatggcgcgtattgagcaggcggcggaagggctggagtgtcggcgttcgttgtccaattcggcggcgactctgtggcacccagaagcgcattttgactgggttcggcctggcattattttgtatggcgcttcgccgtccggtcagtggcgtgatatcgccaatactggattacgtccggtgatgacgctaagcagtgagattattggtgtccagacgctaaaagcgggcgagcgtgtgggctacggcggtcgttatactgcgcgcgatgagcagcgaatcggcattgttgccgcaggatacgccgacggttatccgcgccacgcgcctaccggtacccctgttttagtggacggcgtgcgcaccatgacggtggggacagtctcgatggatatgctggcggtcgatttaacgccttgcccgcaggcgggtattggtacgccagttgagctgtggggcaaggagatcaaaattgatgatgtcgccgccgctgccggaacggtgggctatgagttgatgtgcgcgctggcgttacgcgtcccggttgtgacggtgtaacttgttgtaagtcggatcggaggcaacgtcttctggttgcaaaaaaaatcatccatccggctggtcagcaactgtagttgttaatgtgacagagccattgcccatgatagtgcccattaaaaggatggacactatttccccggaacctgaactcaccgcacaggcgttctacataaaacgcttacgcttcattgttgactcgaactcgacttcagataaatcacgcttcacccttgatgcagattcgggttcatgttcagaatgttgattaacaggctgcgagtcctgttgtctttccagactcaacaggcccaactgttgattcaagagctccaggtcctcctgtaccttcacgcgctccaggagtaccgggtcctccaggtgctccagagcctcgaggtccagttcctcttggtactccagcttctccagcttcttcaggttcaccaggccctccctgtccaaaaagtccaaaagctcctccagaccctgctggtttttcaggccctcgacggctttgagcagcgtcggtaaattgtctttgtcccacgggttaccattacagctaaacaccttcaggcttcggggctgcggcaccggtacagttttaaactggttttctccacagtagtatatgattagtttgggcggcagccgtggtgaagagatcaaatcgttactagaacagtcaaataccttcaggcgagtcaagttctcaagcacctcatcaggtattgagttaatattgttgccagcacaggacagtttatacaggtactggggcatcgacggcggtaaaaattccaagaagttttcagaacagttaatcactctcaggttagtcgacagctcaggcagccagataatatagttttcatagcacttcagtaccatcagtttcgggggctgcaccttcggtaacaagatcaaaaagttctccatacattcaagcactctcagcccctttggcattacctccggtaaagcggtcaacacgtttctactgcagttaaattcaatcagatgtggaggcaaattttcagggagtgaagtcagtccaaggttgctaagatcgagcatactctgtcttgttatgagacattccttcattctgcgcaatgcttctgcccggtcttcactctggcttgctgactggttttcttccaggatatcttccttgatttctttcagtctttctttcaggtcttcttggggaatttctgactgtttgttttgccggttttcttccaggacgtcgtgcagttttttttgcaggttttcttgcaaaccatcctgctgtatagcccattcgcaccatttggcgaccatcatgaactcgttatgttgctgattcaggggagtccccaacgtgatgatggtattgttgtccacctgtatgttcactttgcccgcgatactgaggtcaatgatctgccagggggcatcaccccagctgaatttttgcgggctgagatacttcatgttctgcaacatttgattcttgagttccaccgacaggaagagccgccctggcgggcgtcgtacgcctgtgttaacggaagatgggggaatggcgggggcgaatgggcagatgtctttaaagctagccataatgctacgtatccttgaaataaatatcctctggcagcgccggagacgtgaatgtggtcaccgcaaaggagccacaggacgtcatttgcgctgatataactactcatcgttgactttttccctggtcagaaatgccgtgtcgggtctggtacatgctgtattacggcccaggcagctctgacgtattaaagaagatacgagagcgaacgacccgaaaataatcgttattaagcaaaggaataactataagaaatcgctcatgcatccggtgctataggcggatgaaacgccactacagatactgagcactctgaaacgcgtattgcgtgggctacgtcagcgcggcaggttgcgtgggggaatatgttcaggcgatgtcaggctggggcccatgatggttgacggggataccggtaatgcggggctggttattcttcacctgttgcagtcggaagaagccattacgctgactttcttgagccggtgttttgagtttattagccagagcctgcaatggtttgtcatccataatttaaccttcttctgatgttggaatgtgcatatcaaaatcaggaaatgacaagtttatatacaggctcaggctgcgttaagcaaagcatcgtaaccggcgatagatgcttcattaaatttaagattcagcttcctcttcagccactcgaacgccaatcttcaacacttcattatcttctttctcggccaccgtccagatcatcccggcaaactctacctggtcaccgacaaccggtgccgcgcctaacaactgctggacaatttcacccagcgtttgttgcttatcacgatattctcgcccgtcttccaggccatatatcagcgccacatctgcatatttggcgctggcttcgagaatgaagtcaccaaagaagcgttgatccagcgcgaccggcggcgactggctgaacagtttaccgagcgccgggagatcgcgttcccgaccaattacacacaacacatcgccttcgcgcagtcgggtgctgccggtaggatgaagcaactggttatcacgaaacagtgccgcaatacgcgtctcttttggcatatgcaaatcgcgcagtgccgcgcccacgcaccatttatcggcactcaattgataaacaaactgctcccacggattttccggatgaatatccaggccaacgcgtgacaccggacgtccgacgggcggaaccaccactttggcttttttcgccgcccacgagagtgatgttccctgcaagagcagtgaaaccagaaccacaaagaaggcgacattaaagaacagacgtgcattctccagccccgccatcatcgggaacacggccagaataatcggcaccgcgccgcgtaatcccacccagctgataaacacgcgctcacgcagattgaagccacggaatggtagcaatccggcaaataccgaaagaggacgggcgaagaaaatcatccatgcggacaaaatgagcgccggaatggcaataggcngcagatcgcttgggttaaccaacagccccagcaccaggaacatggcgatttgcgccagccaggcgaggccgtcgaaattttgcaggatgccgtagcggttgcgaatnnnnnnattacccagcagaaaaccgcacagataaacagccagaataccgctaccttccagcgccgtggttaaagcaaaaattaaaataccgccgcttaatgccagcaatggatataaaccggcgggcagggcgatgcgattaatcatttgcagcagtaaataaccaccgccaagaccgatgacaatcccgaggccaaattgctgcagaatatcgaccacgaacatccaactgacactgctttcatgctgctggatcatcgcaatcagggtaatcgtcagaaagaccgccattggatcattactgccggattcaatttccagcgtcgagccaacacgttcgttaagccccttaccacccagcagagaanagaccgctgcagcatcggtggagccgacgatagcgccgattaataagccttcaatcaaatcaagattaaacagccacgccgccatcatgccggttaaaccagaggtgataagtacgcccagcgtcgccagcgacagcgccggtcctaacgccacacgaaaggaactggcctgagtgcgcatcccgccatcgagcaaaataatcgccagcgccaggttacttaccatgtaggcgaaggggtaattatcaaatgggataccgccgacgccatcgactcccgccagcatgccgatcgccagaaaaataaccagaataggaatgccaagacgagaagaaaatgaactaagtaatatactgctggtaacaaggatggatcctaagatgaaaaggctaattattgttgtggcatccaacggtcggttactcctgattacgctgtctcttatataaaccctaccatattagcggcagagacagcgttttacttagccctgaagcgtgattttttttacattttaagaacaggatgaccgctaatcgtcaactgagtgccttcccgggtgttagtaagaatggcatgtgcgcccaacggcagcgtaaccgtgcgttgttcatgaccaaaatcgaggccggtaatgagtggaatcgacaggcgggaacgcaaaaatgcgtacactgactccaggttgtaacctgcgtcataatcattaggcgtactgccgctaaagctaccgagaataatcgccttctgacgtggcaaaattcccgcatgatagagctgcaacagcatacgttcgacgcggaaagggtgctcgttaatatcttccagcaccagaataccgttctcaatttttggcatccacggtgtaccgatcagtgaaatcagcatcgcaagattgcctccccacaacgtgccttcggcccgacatgtcgggccttccccttgccattcaatggtaaaggtttcattgcgtaacgccagccagaaatggtgctcggtaaaggtgttcagttcatccgcgccaaagtttgctaccagcatggggccgctaaaggtgatgacattgccttgcgccagaagaccgcactgaatggcggtaaaatcgctatgcccgcatatgagcaacgggtcatattgttggcgagccaccagtgcctgccagtcaatatctgccagtaaacgactggcaccgtaaccgccgcgtacagccagcacgatggtgttgggggtagtcagtctggcaagggaattgagatcttccagacgctccgtttccgtacccgcaaaacgctcacaacgacgggcaataacctcgacgttattgacttgatgccccgcgtcggtaaggcgctggataccacgcagcgcggcgtgctgtttaatgcagtaacccgatggggcaattaagtgaaacagagacatggcaattccttgctgacaacagatacgaaatgtatatcatgccgcttaggtgtgccgttgtcacctcaacggcgattccaggctataaggatagaagaagtgaaattgagatggtttgcctttttgattgtgttattagcgggttgttcatcaaagcatgactatacgaacccgccgtggaacgcgaaagttccggtgcaacgtgcgatgcagtggatgccaataagccagaaagccggtgcagcctggggcgtcgatccacaattgatcacggcgattatcgctatcgaatcgggtggtaatccgaacgcggtgagtaaatcgaatgccattggtttgatgcagttaaaagcttcaacctccggacgtgatgtttatcggcgtatgggctggagtggtgagccgacgaccagcgagctgaaaaatccggagcgtaatatttctatgggggcggcttacctgaatattctggaaaccggcccgctggcaggcattgaagatccgaaggtactgcaatatgcgctggtggtgtcatatgctaacggggcaggtgcgctgctacggactttctcgtcagatcggaaaaaggcaatcagcaaaatcaacgatctggatgctgacgagttcctcgatcacgtagcgcgaaatcatcctgcgccgcaggctccgcgctatatctacaaacttgagcaggcactggacgcgatgtaaatcagtcgcgtactttgtccgctttctcccgggcttcccgctcgagagagaaaataatccgctgtaattgccgctccaccgtcgggctgacgttaagaaaacggaagctcagacggggagtggtgatggtttcattcttgccatcaatcactttgcgctcgctgatggagattaactgggcgtcaaagtgaaaaacaccccattgccccatgttgacttcaatctgagcgaagcgcataccttcgtgcaacccggcaggttttgctgtttccagtaatgcgcccatgccgcctaacgacaaatcatacaggcggaaacgtaacgtactgttatccgccagtttggtctggcaaaaataaggcggatggagtggggcggagatgcggaaatatcggcgtcgttgtacaaaccataaggtgggaggcggtacggtaataaatgccggaagctgcaagtattcactctgctgtagttgttcaacagtaaactcgactttcgcaccctgagtttcggcggtaatggtaatgtgctgtgcctttagcacggcgatgttgtcttcggcttgactgccgaaatccagcaccagtttatccggggttattaccagtattttgctgatcagctgcccgccaatccaactgagacgcaaaggaattgcggctttgtgcaaatcgcgtaacacgcccaggacggctaacggattttgtttcaggaactgctcatggtaatgactcacgcggaaaaactcctgactgacaaactgtctttggtttatcggtcacagttaacaaaacttaatacaaatgcgtgaatattttttacatgttgttcttaaatcagccgacatacgcccagcatcgatcccgcccttgcctatacttagagcgttgacgtaagcatttcttgcgtccgattcatcgaaacgagggcctgaacatgggaattattgcctggattatttttggcctgatagccggcattatcgccaagctaatcatgccggggcgtgatggtggtggatttttcctgacctgtattctcgggatagtcggtgcggtggtcggcggctggctggcgaccatgtttggcattggcggctccatcagcggttttaatttgcacagcttcctggtggcggtggtgggagctattctcgttctgggcgtattccgcctcctgcgaagagaataagattttcataaggcggatagcgatacagatgccgctatccgctttcacatcagaacgtatactcgacacctgcccagaaattgcgaccttcttcaataaacccttcactgtaggcatattgggtatcaaacaggttattgaccgacgcattgacgctgaagccatgacctaaggtgtaatcggctcgaatgtgggtcaccgcaaaaccggcggctttttgtgaaccgtcactgttactgtagctggaggaacgcgcctcttccgacagcgttacgcttaacggctcccacggtttgagagtcatccatgcggtcattgtctgcgttggcagatcggttatcttgccgatgtctttacgtttggcgtcagcgtggatcagggcgtagctcaatcctacatccagtatattgctgattttccccttaataccggcatccagaccgctgtaatccaccgtgccgctgttctgattttgaatggtatcggcatcgatattgtgcgagaggatggcatcactcacccggttatagtaaacgctgacctcaaatccccagtcgtgcgtgaaggcaccattccaggttaaatccaccccgcgagcgcgttccggcttgagctgcgggttaacaatcgctatctggttatacgcaggtttggatgtggtatagcgttctttcagcgtcggaaagcgtttgcggtcatagtacgaaagcgccagcgtgtcttcattgacaaagtggtatttccccatcacctgccagttaaaagctgactgattgttgtcgtcataatgggtgatgctgccatctttctcgtgttttttcgcttctacgctatcgcgccagtcatagctgattccagccacaacatcgacattatcggcagcagcccattgatattcactggcgagcgaccaggtacgatcttcatagcgatcgtaagcggcgtgcgnnnnacctttttcccggtgtacgtcatctttccagttaacggcaaacgacagcagatcgttttcacgcacatcggctgccagttgtaatccggcaccgtcgctgtaatcggaataatggctgtagctgccttttttatttttcaaatcagccagcgagttgtacatcatcagcgtattttcaaaggtgtcgcgatacagccgacttttcagggtaaaacgatcgtttagttgggtcgttccctgataataaaaactttctttgtcatactctggccactgccagtagcgtgatttttgaccacaatttccgctgtatggcgggttatctttttcaccatcctgcttaatgtaagtcagtgtgtattcatcgttttcacgtggtgtaaatccgagcttcacaatgccgcgtttatcatcagccgatgaattaatcatcttgccgtgtttgcctgcaatatcattatttacaccatgcggcaggccgagaaaatcctgctttagctggctaccgctgacttgcaaataccccagttcgctgctggcggcaaatgaagcatgcatatcataggcattgtcctggctacggctccatccctggcgatatcccagacttgcttccagaggttttgttggcttctgggtggtgatattaatggctccgcccatctgattaggtccctgaagcagcgacgaataccctttggaaacttcgactgcccccagattgttggtcagaatccgcgccagatcgaggttgccgtcatagggaacataaatgggcacaccgtcgaaatagaccggcacctgccgantatcaaagccacgaacttttacctgttcttcgttgcggctgcctgacttttgcagcaccacgccggggacgacacttaatgcctgagcgacattctgtttatccagggccttcatggtgggttgatcgagaacggtggtcgtcgtcgatgataccggactggaccatacggtcagcgagtcgctctcctgagccgctacggcctgctgggtaaaggcaagtgataatgctgtgcagagataatgttttttgagtctcatagaataaattccgtttaacaaagaattaaatagaggctgcgggttgcagactgactttaatgtcagccggtgccgcgtaataaggcgcggaggtaataaagaggcgaatgccgcagtcgaggtaatttttgagtgtcgtcagattaattccgccggtcagagccagcgtgcagtggggagccagcgacggcgctatttgcgcaatttcagttgcctgttgcggactaaatttgtcgagctgaagtacgtctggttgcgnnnnnnnngcggcgattgcctctttcggcgtgtcggcttcaacaacaattttcttctcgggtgcgtggcgacgtaactgattgattgcgcctgaccagtcctgattgtcatgaagaaaatggcggtggttggcaaacaataatatggtttccgcacatccggcacgatgaatcagtcctccggcagccagaattgcctgcgaggccagtaagcgggtgcccggaattgcttttcgggtgcaggcgatattgccatcaggataacgttcacgaagtaacgccagcatttgatcgagataatcagaaacaccgcaactccactccagcacattctggattgccttccatccctgatgaagtgctgcggcattaccctgcgcacggattagccgctgacccgcgttcgcttgtgaaccgtcgctgaccgcgtcatcaatagttaatcccagcgtagttaacatcttacacgcgacagaaacgccgctgacgcagccgccctgacggagaaaaaactctatatagccatgctggtgtccaatatttaatgctctcgtggtcaggtcaccgccctggatatcttccagaagtaacgcatcgatttgtgcctgagaaaggaaaatcatcgcagtgcctcctgcggtacgctatcccaccagatgagcgcccagtcgcggctggcaggggcgagggcacgagcatcttgttgttgataccagcgatataaccgctcacgctcatcgtcgttaagcgcgccaagactccagctgacgttctgctcaaaacgttcccaggtgctgttatcctgttggcaattttgtccacggataaaatcaacgtgggcataaattcccatctgatacaggacgttgagcgcaaagatatagttgggtaattcgatcacttcccgaccagccgcccgctgaatggctggagagacgaacgaggtgctgaccagatgagtcgtatagacgcgaagccgtgcctgattattcagtttgctcattgcctggcgcatatcagccaccagagtggagcgggaagccacggcaatatcgcagcgtggcaggtcactccagtcctcttcccaggcgcgctggatcaagtggacattgtctgccttcagcgcggcggcgcgacgggcggcaacgttcagcatcccctgactgtaatcaacgccataaatcgtcgtgagtttgtcagccagcgccagcgatacggtacccggtccgcagcccatatcgaataaggtctgagcgccttgtaggtcaattttagcgatcagttgttgcaggtagctgtccgtaggcgaggcgcaattttccgccattttttccgcccgttgatcccagtgatccggcgttttttctgtgcggtgggccagcttgagttgctgcagataaaggtctgcaaaatcaatatcatcaatgagcatgatttttccttagtggctaattgcagagaggtgatgatgaatctggtcggcagaaacccgatacagggcagccagtttgtttgttgttaactgttcggtcggtaagccttgtgttactcgtccatctggctctacctggataatgctgtcggcaatggcgttggcatggagcggatgatgagtcgacattaacattgtcatgccgttatttttgagctgtgccagcgtgtccagtagttggatctgatgaccgaaatcgaggctggaggcaggctcatccagtaacaacaagcgcggttgctggacgagtgcacgggcgattaaagccagctgacgttcaccgccgctaagcgtattccagcgtcgtgccgccagatgcaaaatgcccagcttttccagttgctccgtggctttcaggcgttcttgcttaccgggaacggaaaaagcgcctatggtgggggccaggcccatcaacaccatatccagcacactaaaagcaaaaataccgtcgtgcgcctgcggcacccaggcaatagcctgcgcgcgctggcgatggctgagtgtctgcacagggaggctatccagtaagacctcgccttttaataacggtataacgccaagaatggagcgcatgagtgtggttttgccgcaaccattggctcctaacagacaacaaattgttccttgcgacagggtgaaggacacgtcgcgtagcaccggatggcgggagtaacccagagacgcatgacggacggcaagcaaagtcactggcgacctccgcgtaacaacaaaagcaggaaaaacggtgcgccaacaaaagcggtcagaatgccaagtgggatttctgttgttccaatgctgcgtgccagcgtatcggtaagcaggagcagaatcgcgccagtacacattgccatgggcaacagctgctgatggttatgaccggtcaacaagcgggcaatgtgcggaacgaccaggccgacccaaccaattatgcccgctattgctaccgtactggcggtgattagtgtggcgcagacaatcaatacaaagcgcagacgcgtcacgttcagtcccagcgaacgggcttcgtcgtcggaaagcgtgagtaaattcatgcgccagcggagaaaaaacaggggcaaggagcctatgagaatgatcggtgcagcatagcagagatcgcgtaaggtcacggtggacagtccccccagcaaccagaaggtaattgacggtaactgggtgtaaggatcggccagcgttttaattagcgatatccccgctccgcacaacgttcctaacgcgatgcctaccagcaccagggttaagatcggatcgtggcgggtcacccgacgcgtaatcaaccagacgcccgcgaccaccatcagcccgccacaaaatgcgtacagctggatgtaaacaatggataatccccacagaattgccgtgcaggcaccaagtccggcaccggcggagacgcctaaaatatccggtgaaactaagggattacgcaacattccctgataggtggttccggctcctgccagcgccgcgcccagtaacagcgcagcaagaatacgcggcacgcggatttgccagaagacaatttgttcctgcacaggaacattttcttgacgaagaattagcgccagcagttgctgcatatcgagatgataagccccacttacggcggcaaaagtgatactgatagctgccagcagcaaaatacatccgtttacgattctcattaggtcgccaccaatttttgatagtcggcgtcactgagtgaacaatgccagaacagttgggcgtaatgctgcatgtcacttttaaactggcgattgatggcgggatccagccaggcgtgaagtctgcgtaatcccagaagacggttgattcccggtggggcatccagccagccaaagggcaagccacttaaaaataagatgcgttgttctgcaacggctttcacgccatgccagagaggatcacgacgaataaaatctgcagtaacggcctcctgaaccagaataatatccggctgccagcgcaggagattttccatggaaacctgtgtcaggccttggcgatcggctatttgcgcgacgttgtgcaaacctaataattccgccgcctcggtatgcaacgaaccctttaagcccgtctccagccctcgagggccgcgcgcagnnnnaaagcggaggttagcggcgggtgaggcggcgaatgcctgagcttcaccaacgaagcggctggcgagattggcttgttctgcggcgcgatgctcttcgcctaacgttttgccaagcgttgttaactgttctgctgattgcgccagtttcccgttaagcaataaccagggtatttgtgtctgttcgctaacctgccgtgcctgggagatccaggtttcatccgtattgccgcaatcaacgaccaaatcgggatgtaacgccataagcccttccagcgagagtgtgctggcncgcccggcgagtcgtcccagcctgggtaactggcgaatgtgctctgacaatggaattaatgcctgacgggcaaaatcaaaagaggaaaaaccgaccattttttctggcgcgacagccagcaatagcaaatcggcgggcgcacctgcgctgacgatgcgtgtaatgttttgggcttcgggaagcgtcagtgaggcccagaatttgactgattgtgcaaaagaaggcagatgatgcaggaacaacgtcgacgcaagaatctgtgtaaacctccgtctggttagtgacataagttatatcctgataattaaaaccgctatatatttacatatatatcgaaaaaaatcatgtttgatgtcaaaatttgtctaaagagacagaatgatttgcttgttgcttaaataacactttgttccacaagaaaattgtcagggagaatggcggagtggcgaaaaatataaatagaggtgtactgattaacaaattgataaaataaaataaaattaaaatcttctctgatataagaaaataaaagcatagaccgtagaatggggggcatttcgtggcgaaaaaagagcaatgccaattttatgcacataatggcattgctcgatatacagcaaagttaaggcgtaggttccgcctctttttgttttaccggctgtgttgttgattcactgagtggacgcgtcgccggaacattgtcacacggttgctctttcgggcagatcaaatccagcattttcagcgtcacgccattggtccagccaaagccatcctgtaatggatattcgccaccgccgccccccgttccggtggtgctgacatcatatttttccaccagctttttctcccggtcataggtgtgctgaacattggtcaggaagtgccagctaatgtccatcgccacctctttttgcccgtagttttgtaatccttctgtcgcgacccactgtaacggtgcccagccatttggcgcatcccattgttgcccacttttcaccgacgtggtgttcaggccgccgggttgcagcagatgagttttcgtcgccgtcgccattttgttggcgcgatctttcgctgccgcattgacgtacagtgggaacagggnggccgcggttaactgattgcgcactttatgacttttcaggtcgtaatcggcataccagccttgttgatcgttccacaggtatttttcgatccctttttgacgggcatttgccagtgtttcgtactggtttgccatcgcgttatctccggcagctttgctggcgcgggcaaggattttttccattttgaacatcaggctgttcagatcgaccggtacgatgctggtggtgcgtaaggtatttagttgctgcggattgtccatccagcgcgagctgaaatcccagccagacgcagcagcagagcgcaggtcgcggtaaatttcagtggcaggtcgattcggattgcttttagcggtggcaatatcttccacccatgactctggtcgtggcgtatcgcgatcgtcccagtagcggttgagaagggtaccatcctgaagttttacaacgcgtttttcctgttgtccggcttgcaggttttcaacaccgtccatccagtaagcatattctttttgcatttgcggcaggtattgcttcaatgcggcatcgccttcatgctgcgccagtaactctaccatcagggcaaagaagggcggctgcgagcggcttaaatagtaactgcggttgccgttgggaatatgaccgtaagtgtctatttcatgagcaaaattggccaccatatccgcgactttatcccagtgaccgctttcggcaagtcctaacatggtgaagtaactgtcccagtaatatacctcgcgaaaacgtccgcctggcacgacataaggttccggcagcggtaacagagaatcccatttttcggtgttttcggtagaacgcgttaataccggccaaagtccgtcaatatgttcgcgcagtgactgtccctctggcggaacatatttctcgccctctttcggcagggtgaaattgacgttaacgaaatggcgcagatcaaatccgctctggttttgctgcatccgatcatcagcggatcgctgttcggcacggcatcggcaaaggttttttggtccggaaaaagtttggcgttttgcacatcattaaacagcggccctaaaaaaatatcaggcggctgtggcgttaccggtgtttnttctgcctgcaccgatagcgcagcgaaacacaaaaagatgcaggctggaattaacgccattttttgcgggcgagaaggtgcgggggatttcatcaatcattctccttaggcgaaaccgaataaaacggtattcaagtatcagaaaaccttagttcaggatcgcactagctgcatgatcgaaatctcattctgcgaactgtcaggcattttagaaaagggaattaaagggataaataacggcgaaatagagtgatcaaataacgtctgtttattagccagccagcgtcgtttggttcgcgattagcgaagaaaaatcatcataaattggtgaaaaacataacaggtagttaaaaaacattagtgctgagtaaattgccggatgacatcagaacgatgccatccgaacggtggcttaaccctgacggttgaaacgttgcgttttaacgtccagcgttagcttttcttctggttgtatcgcatacagtttctcaccctgctggcaaatccagccaatccccagttcacgggcgatcagggcgctgtgggataccggacttccggcgctaaggcagataccttttacaaccgccggatccagttgcagtactgaggagggataaatgttctccgccagtagaatagttggcgagttaaactgcgggagttcttctttcgtttgggtcaggtggaccagggtgcgatgcagaagatcgtccacatcaatatagcgagcttgtagatattcatcatccagttgctggtattgctggctaagttctttaagaacttgctgccaggcatattctgccgtgcaatgttcgtgctgaaggagttcgcttgccgccgccagcagttccggatcatctaacagtgtatggtgaccagaaaagattgcggcaatatcgtcaagcccgctggcttctgcttttgctgttaacgtcatcagatctaataacgtgaagtcaatggcctggcgtaatcgttcctgttcttcttccacggtcaggggtgattttgcctgtaccgtacataaaactggttgataataaaaggctttacccgaaacaggcggaacgggacgcagagtaggtggagcaacttcctccgtttcaccaaagttatcttcagccagctgacggaaagcgatcagtgcctcttcagcttctggccctttcgcaatcaggcgcagcgtatcgttatagcgaacttgtagtaacgcaatctggttaatactctccggtgtgacgcatttgccgtttttttccagcaacatatcggcattaaatgtcgataaggtataaaccagccgggaggccggacggacgtgcaggccgttacggtttttaatgaccaccgccagagaacgggcttcttcatcgtacgcaggacatgagtcagagatttcagtgtcggaggacggtaaacccagttgttcacgtttggcttccagcgcatgcatggcgtcaaagataactttgtcgatctccgcccccgaggccgcgctgacagttgctgccagtgtaccttcgaccaacggcgcagcacacaaacgtacttttgcggcgatctcgggagccagcaattccagcgcagtttcagcactcaataatgcgctacccatatccatcatgaccagcacatggtcggcatcagcaacagattcgatggcctccatcactttgacggcatcggtaccaatgggattttgtggatcgtcaattcccgcagcaatggcgattttacaattatcactcattaacatctgacgggctaattcaccgacaccttctcccagtcggctgctatgtgaaactatgaccaggtttaccatcaccaattccttactcttttgcggctaacgccaacatttgcatcataaacatcaccgangttgcgccgggatcctggtgaccaatactgcgttcaccgagataactggcgcggcctttgcgggcttgcatcgtaatcgtactttgtgcagcgaattcggcgatgctactggcagcttcgagcgccgccggaacagagagattttgctcgctggactgacgtaacgattccaccaccggcacccacacatcacacatggttttatcgccaggttcggctttcccgcgactgattacgccgtccgcgccatcgcggaacatctgataaagctcttccagcgtcaggctttgccgtgcctgggtcgcctgtgcggcgcggataaagaaggtaccgaacagcggaccactggcaccaccgacgcaggaaagcagcgtcataccggtattcttgagaatgaaaccgatatctttatctgcaatagcagggagtttttccaccactttgctaaagcctcggttcatatttagcccgtggtcagcgtcgccaatctcgcgatccagtccggtaagatactcgctctcggtgttgaaaatatcgccacaacgagtgagccagttaacaatttgagttctgctcagtgacattgctttctccttatttaccccagttaagggccggggtgtggaccggggcgtcccagagtgccagcgtttcgtcatcaactttcagtaaagtgattgagaaaccggtcatatccagtgaggtgcagtacgcgccaattaaattacgctcgatagtcaatcccgcttgctggcaacgtgtggtcaggcggttatagacgccgtacagctcagaaagtggagttgcgccaagattgttaaccagcgcaatcaccctgtcgccagactggagcggttgtttggtttgtggttcttcctgccaactgccttgttgataatcccagaaacgcaaagtgcgatggtatgagccattttccagcagggtgtcgaacatttcatcgacggtttgatcaagggaagagaaggggcgacggtcaatacccggctcaccatgaatgccgacgccaaactccatctcattatccgccagggtaaaagaaggtttgcccgcggcaggaacggtacaggcaccgagagcgatacctattgagtggccttgattattcaacttacgccccagttccgcacaggcgtccagtgagtcgccacgctccgccgctgcgcctacgagtttttcaattaatacggtgttggcaacgccgcgccgcccggcggtataaagactgtcttttactgcaacgtcgtcatcaatgaccacagtggtcacttttacgccgctatcgtgcagtaactcggtcgctgtttcaaagttaagaatatcgccggtgtaatttttgataatcaacagtacaccttcgccgccatcaacttgcatggcgcattcaaagatnnnnnnnnnnnnnnnnnnnnnnnnnatttcgcccggacaggcccccgaaagcatcccctgaccgatataaccacagtgcatcggctcgtgtccgctgccgccacccgacagcagggcgacttttcctgcaacaggggcatcagctcgggtgacatacaccggatcctgatgcagtgtcagcgatggatgcgctttcgccagtcctgccagttgttcgtccagtacgtcttgcacatcattgatcaattttttcattattttgctccagcaattacggtagggcatggatgatgttcaacgacacggcgaccactgactgccgatgaatccattgtgcatcaggcaagggaaaagaaaattagcccaaattatgtttcatagtgaaacatatgctttaatgaatgttccatattgaaacttttacgtgtattaatacttannattgcgagccggaacaccttttgtcataagggatgcgggatatgagtggcgcttttaacaacgatggtcggggcatatctcccttaattgcaacctcctgggagcgatgcaataagctgatgaaacgggagacatggaacgtaccacatcaggcccaggnnnnaacgccattaccctcgccaacaacatcagcacgcataataaaggtactgttaccgctcaggttctctacgtttaatgtggtaaatgtgccggcagttgacccgtggctggcaaaatcgacagttgaatggctcagcgccagcgtgtcgagattagaattacttgttacgttccagacgctgttattcattgcaacgtccagtttcccgccattgacattatcgctgagggaggaacctgtccaaaccgacccagggtgcatatccagattgattagcccacctttggaaagaacgctaccgttgataagcatacgacccgaggcgttgatgcggctggcggcataaccatcgtcatgttgcgttgcgatggccatctggtcgggtgtactcatatcaatgaccagatcgctcgtgaggtcgatctggctgttggtcatggcataaatccccctggctcctgccgcgccggtgatagccaaactgtctccggttattctaccgccgctgagcgcccacaaacccagcgccagactgccattacgatcaaccgtaatatcggtattttgcatgttgataacagccgttgccgtctgggccgaggcaccataagaaccgccggaaaagatgctgtttcgttgcgctgccgtgccagaaaaattgattgtcgcgtctgaaccactggtgacgagaccaccgccctgcgcggaagaaatatggctatctgcaccgatagtggttgtaccaccacgaacttcgacgccattggccgcggctccagttacatcaacagtgagtgcattcgcgctaacctggccaaagctccagaggccgtgtgcattatcgccactggttttaatggaactgtttgttccgagatcgacaacagagtttttctgtacgtttatccccatggcgctgtagccctgaacatcgattgtcaggtctgtcgccgtaaaacgcgcagcaccattggcgttattgccgttgagaccaccgatataaacacctgtacttccatcggtcttgattttacttccgcttccaagatcgacactggtgccatagtcattgatggttaggcctataccgttcgagttttcaatggtgaattgagtggctgttagtgttgagctatgcccaataatgatgccgtcatcgttactcttaatggtgctgcctgtgcctaagtcagcatgggtatagtcaccaattaaattaatgccgatggcagaggtttgaccaacaacatctactgtgagtcggttagctgtcagggagctgtttttgccctgaataatgattccttttgcatatccagaggcgtcgttgacattgacggtgacatcattacccaggttgatattgccaggcgtgtttcctgctggggtcattacaccatagaggtttcctgatggatcggcggtatctccagtaattctgtcaccatcattaatagtaatattggtgccatattgacttcctgtatcagcagctatcagcagggnggaaaagagaattgcattcaaaccaatagcgccaaattttatcagttgaattgagggcgaacggatttttaattcagcgagacgatcggctttggtattcccattgtgttgtttgatgcccataccantcctatatagtacccaggctatgggtctatggattttgtcattttgtttaagtcaatgaataatatcctcttatcatcatgatatttgtatggtgcaatcatgatgagcttctctgagaataattctctattaccgggcaaaatcagaaacacagaaattannnnntatttaacatcccccttacaaaggtgagtttagatcgagttattccctaagttgtcgttacttattccaattcgttactattaatatgacaaaaacattacaccaaacagcggttaaataatttggtgaatatttttggtaataatcctaattagttatgggattttcgcttgatgtatctgcataacaaaaacaatatgcgccatttttgcattactaataagaaaaagcaaaaaacatcgatattcatttttggtcaatgggttttctggtctatcgttgttattgtgctactggttatcattttcatcttgccaggatcgcacgtaatcacgttattcggggactttatctgcgggatattacccttcaggtaagtccttttctcgccagcatattggagcgtgntcaanattgatcggctgtgaagggggctgatgtgtagtggaacaaaaactgacgttatatcactgctaatgagatatccgtcatctgaacactgatgtctttaattattctcgtggttcactgtaggcaataagcacaaaagtgtaggatgttacaagaatgattaggactcggtgaaatgaaaaatccacgcaattgcgtggattttatatacttttgcgctcttcatgagatttagcgaaacctcatgagacaataaattaattagacgttgaaaaggaagttcatcacatcgccatctttcacgatgtaatctttaccttctgcacgcattttgcctgcttctttcgcgccttgttcacctttgtaagtgatgaaatcttcaaacgagatggtttgtgcacggataaagcctttttcaaaatcagtatggattttgcccgctgcctgcggcgcggttgctccaaccggaatggtccatgcacgcacttctttcaccccagcggtgaagtaagtttgcaggttcagcagcttataaccggcacggatcacacggttcagacccggctcttccagcccaagctcctgcataaactcgtcacgttcttcgtcgtccagttcggcaatgtctgcttcaacagcagcacaaaccggaaccacaacagaaccttctttcgccgcgatttcacgcacctggtcaagatatgggttgttttcaaaaccgtcttcgttgacgttggcgatgtacattgttggtttcagcgtcaggaagctcaggtaacgaatagccgctttctcttcagcgcttaaatccagcgcgcgcagcatacctgcgttttccagctggggcaggcatttttccaggaccgccagctcagctttcgcgtctttatcgccacctttggctttcttctgtacgcgatgaatcgcacgttcgcaggtgtcgaggtctgccagcgccagttcggtgttgataacttcaatatcgtcagccgggttaactttgccggaaacgtgaatgatgttgtcattttcaaagcagcgaacaacgtgaccgatcgcttcggtttcacggatgttggtcaggaactggttacccagaccttcgcctttcgatgcgccttttaccagaccggcgatatcgacaaattccatggtcgtgggaagcgtacgttgcggttttacgatttcagccagttgatccaggcgaggatcaggcattggtacgacgcctgtgttcggctcaatggtgcanaatggaaagttggccgcttcaataccggctttggtcagcgcgttgaacagggtanatttcccgacgttgggcaaaccgacnataccgcatttgaatcccatgatttaaatcaccttaatatcttaataatcaacctgttattgctaacagattgcagaaatggaaataactttgcctattatacacggcactcggcaaaaatgccgcagacaacgacttattgcgctttaaaggcgtgcaatcggttcgttgctttggtcaagccatctgtaaaccacatttcagtacaacgcgccgcttcgtcgatggcttcatcaattaacttctgttcactaacaggcggtttgcctaacacaaaaccaacaactttatttttatcgcccggatgaccgattccgatgcgtaaacggtgaaagttagggttattacccaatttactgatgatgtctttcagtccattgtgaccaccatggccaccgcccaacttaaatntggcgacgccaggaggcagatccagttcgtcgtgggccaccagaatttcgtccggattaatgcggaaaaaactggccatcgccgcaacggctttgccgctgagattcataaatgtagtcgggactaacaggcggacatcttcgcctccaagggtgactcgcgaagtataaccaaagaatttagcntcttcgcgcagcggagcgcgcaaacgctctgccagtaagtcaacgaaccaggcaccagcattatgtcgcgttgcggcgtattcagcaccggggttcgctaggccgacaatcaatttaatcgtcacgtttttttgtcctgagtgtgtacataactggcgcgtagtttactggttgcggccccgcttgacaaaaaactgcgtatcaaatgcagataacgtaataattgcctgagtggactattagaaagtcaaggtgttcaggcgtttatttgtaaagttttgttgaaataagggttgtaattgtgatcacgcccgcacataacccacagggtgttgtctatactttacacataaggaagaggggtattccctgttacaacccagaaagttccggaggtgacatatgaaacgcaaaaacgcttcgttactcggtaacgtgctcatggggttgggtctggtggtaatggtggtcggcgtggggtattcaatcctcaaccagttaccacagtttaatatgccccagtatttcgcacatggtgcagtgctaagtattttcgtcggtgccattctctggctggcgggtgcccgtgttggcgggcatgaacaggtgtgcgaccgttactggtgggttcgccactatgacaaacgttgccgccgtagcgataatcgccgtcatagctaacaaataatgcagtttgctgaccagtcagtttgcgctgactggtcaatctcgtacttataaatccgccatcgccgcgcgacgattcgggaagaacgcgaggcgtcccgggatcggttgaatgcctgcgcgagccatagtgcgcagtggctggaattccacgttgcacacgcgcagttcacatccttcgggcagacgcttcacaaaacgctggaacgcatcaagaccaccagcatcaagtaccggaacggcatcccacttcagaatcacaatccgtttgccttcaagacgtgactccaggtccgtgaataagccttcagcagcagcaaaaaacagcgggccaataacgcgcagaaccaggacatcgtctggaacatctacgactaccggtgccaggcgagtcatacgtgcgatacgacgcataaacagcagcgatgccagcacgatccccacgctgatggcaataaccatatcaaacagcacggtcagcgacatgcacagcagcatgacaatgatgtcatctttcggtgcatgacgcagcaagtcgaccactttatgcgcttcactcatgttccacgccaccatcaacagcagggctgccatagcggaaagcggcagccaggagagcagcggtgccagtaccagcagggcaagaataaccagaatagagtggatcaccgccgagataggggaagttgccccggcacggacgttagcggcagaacgcgcgatggcagcggtagcggtaataccaccaaagaacggagcgatgatattccccagcccctgtccaaccagttcgctattcgccttgtgcttcgtcccggtcataccatccagcaccacggcgcagagcagagattcgattgcgccgagcattgccattgagaatgccgcaggcagcagtgtgcgaatagaatcccaggttagcgtgaattctgaattaggcagatcccacggcagcaccagttgcggtagcagttgcggaataccgttaccctgagaaccatcggccaggacgtagtggaattgcgaaccgatggtagcaacatgtccgccgagcaggttaacaatccccatcaccgcgcaaccagccagcaaggccggaaggtgaccgggtaaacgaatgcccagacgcggccagaaaacaagaatacctagcgtcacaatgccaatggcagcatcacccacattaatggtcggcagcgccataaataatgcgccgactttttgtagataatgttccgggacatgggccatttgcagaccgagaaaatctttaatctgcatggtaccgatggtgatcccgatacccgaggtgaaacctaaggtgacggaaaccggaatatactcaatcaggcgaccaaagcgtgccagacccatcagaatcaaaaagatccccgacagcaaggtcgcaaccagcagtcctgccagcccaaactgttgcgaaacgggatagagaattaccacaaatgccgcagtcggaccggaaacgctaaagcgtgacccacccgtcagagcaatgacaatccccgcaacagctgcggtatataaaccgtactggggtgccacaccactaccaatagccaacgccatcgccagcgggatagcaataatcccgacggttatcccggcaatcaggtcacgggtaaaccgtgcggcagtatatttttctttccagcaagcgtcgatcagagcgcggaaaggcatcacatgtgaggaannnnnnttgttcacaataatgtttcatccgtgagcgcatcatctgtcaactaaatggcaggtgaaggaggcataggtcatacaaatggatattacagacaaaaaaacccgccgcagcgggtctttgagccgggttcgattagtgttcgaacatggcagagatcgattcttcgttgctgatacgacgaatcgcttcggccagcatacctgacagggtcagagtacgcacgttcggcagtgatttgatttcatcgctcagcggaatggtatcgcagacaacgacttcatcaattacagagttacgcaggttgttcgccgcgttgccaganaanatcgggtgagtcgcgtacgcaaatacacgtttagcaccacgttctttcagagcttcagcagctttacacagcgtaccgccagtgtcgatcatatcatcgaccagtacgcagtcacgacctgcaacgtcaccgatgatatgcatcacctgggaaacgttcgcacgcggacgacgtttgtcgatgattgccatatcggtatcgttcagcagcttagcgatagcgcgggcacgcacaacgccgccgatgtccggagaaaccacaattgggttatccagattcagctgcagcatgtcttccagcaggatcgggctaccaaatacgttatcaaccggaacgtcgaagaaaccctgaatctgttcagcgtgcagatccactgtcagcacacggtcaacaccgacgctggagaggaagtctgcaaccactttcgcagtgattggtacacgagcggaacggacgcgacggtcctggcgcgcatagccaaagtaggggataacagcggtgatacgacctgcggaagcacgacgcagggcatcaaccataacgactaattccatcaggttgtcgttagtangggcacaagtggactggatgatgaaaatatcaccaccgcgtacattttcattaatttgtacgctgacttcgccatcgctaaagcgacctacagcggcgtcgccgagtgaagtgtacaggcggttggcaatacgttgtgctagttccggggtggcgttaccagcaaaaagnttcatatcaggcacgagaagaacctcaggcatgcgtccattggtggaaagaatctgccgaaaactgtgcgggccaggcatgatcctttccaggcggtgtattaaagagcgcgatgcaacgtctggaacaaggtgacgttgtcaccgaaactcagcttgcccggcttaaagcatggctctgtgcaatggggaaagattagcgcctttcgccacaaagccattgagccattccggggcttgctctagcacctggcgggcttcagactctgtatcaaattcagcaaagacacaggcccctgtcccagtcaggcgcgacggggcgtattctaacagccaggaaagcaccgcatcaacctcgcgaaaacgttttcttgcgataacctcgcaatcattgctgaattcacattttagcaacgtttctattgacctttttggcgtattgcgcgggagttcaggatctttaaaaatcaccggagtcggaatacttacaccagggtgcgccaccagataccacttctctggcggatccaccggggttagtatttcaccaacgccttcggcaaacgcggcatgcccccgaacaaagacaggaacatctgcgcccagcgtcagccccatttccgccagctcatccatgcttagcccgcattgccagagatgatttaatgccaccaggaccgtcgcggcattggatgaaccaccgccgagaccgccgnccatcggcaaacgcttgtcaatgctgatattcgcaccgcttcccgtcggaagacgcccgctgtctgccgcagttttcatcaacaaccgcgctgcgcgaacgatcaggttatcttcatgttccacgccttcaacgggcgttaacagacggatatccccatcgtcacgaagctcaatgctgatggtgtcgccgtaatcaagaaactgaaacagcgtttgcagcgtgtggtaaccatccgcacgctgaccggtaatgtataaaaacagattaagttttgccggagagggccactgtgtccgcattatttcactatccagttatccatttttaacttgatgcgttgaccaccgtcggtgagttccatattggctggcatcgcaggttgcgttttggtgtcataaccaccataaacaaccttccagtttttgccattctggctgtaggtaatttcgctcaggcggtactggtcgtccagtttgtagtcggttgcatcacccggtaaacctaaaatccactggcgcaagctgttgagcggaattggcattccagtcaatttgccaatcatctcttcggcgtcatcggcggtataacgctgacctttattgtcgactaactgcacgttacccggttgagcattcagctccagttccgtgctgcccaatgggttagtgagcagcagacggtagcgatcctggccggtttgctgccagaaaaagcgggcgtacactttttgttggtcagaaatataagcgaacgcgccgcgagtctgatactgattaagattgcgcacgtcttgctgatgctgacgccattgtggcgaatccgggcttttgccaggacctttgggcgtggtaacggaacaggcagtgagcacaagagcagccagcggtagcaggcggataagacgaaaatcgggcaggggcatagtgatgacaagtccttgagatacgttgcagttataacccttaatgctagcgtcaccattagtcatcgtctatgttcaagttgtcttaattgtagaaatctaacgggttcgggcaattactccaaaagggggcgctcccttttattgatctcgcgcatacggtatgatgcgccgagactaaccttatcaacgttggtattatttcccgcagacatgacccttttagcgctcggtattaaccataaaacggcacctgtatcgctgcgagaacgtgtatcgttttcgccggacaaacttgatcaggcgctggacagtctgctcncacagccgatggtgcagggcggggtggtgctgtcgacgtgtaaccgcactgagctttatcttagcgtcgaagagcaggacaacttgcaagaggcgttaatccgctggctttgcgattatcacaatcttaatgaagaagatctgcgtaaaagcctctactggcatcaggataacgacgcggttagccatttaatgcgtgttgccagcggcctggattcactggttcttggggagccgcagatcctcggtcaggttaaaaaagcgtttgccgattcgcaaaaaggtcatatgaaggccagcgaactggaacgcatgttccagaaatctttctctgtagcgaaacgcgtacgcactgaaacagatatcggtgccagcgctgtgtctgtcgcttttgcggcttgtacgctggcgcggcagatctttgaatcgctctctacggtcacagtgttgctggtaggcgcgggcgaaaccatcgagctggtagcgcgtcatctgcgcgaacataaagtacagaagatgattatcgccaaccgcactcgcgaacgtgcccaaattctggcagatgaagtcggcgcggaagtgattgccctgagtgatatcgacgaacgtctgcgcgaagccgatatcatcatcagttccaccgccagcccgttaccgattatcgggaaaggcatggtggagcgcgcattaaaaagccgtcgcaaccaaccaatgctgttggtggatattgccgttccgcgcgatgttgagccggaagttggcaaactggcgaatgcttatctttatagcgttgatgatctgcaaagcatcatttcgcacaacctggcgcagcgtaaagccgcagcggttgaggcggaaactattgtcgctcaggaaaccagcgaatttatggcgtggctgcgagcacaaagcgccagcgaaaccattcgcgagtatcgcagccaggcagagcaagttcgcgatgagttaaccgccaaagcgttagcggcccttgagcagggcggcgacgcgcaagccattatgcaggatctggcatggaaactgactaaccgcttgatccatgcgccaacgaaatcacttcaacaggccgcccgtgacggggataacgaacgcctgaatattctgcgcgacagcctcgggctggagtagcagtacatcattttctttttttacagggtgcatttacgcctatgaagccttctatcgttgccaaactggaagccctgcatgaacgccatgaagaagttcaggcgttgctgggtgacgcgcaaactatcgccgaccaggaacgttttcgcgcattatcacgcgaatatgcgcagttaagtgatgtttcgcgctgttttaccgactggcaacaggttcaggaagatatcgaaaccgcacagatgatgctcgatgatcctgaaatgcgtgagatggcgcaggatgaactgcgcgaagctaaagaaaaaagcgagcaactggaacagcaattacaggttctgttactgccaaaagatcctgatgacgaacgtaacgccttcctcgaagtccgagccggaaccggcggcgacgaagcagcgctgttcgcaggcgatctgttccgtatgtacagccgttacgccgaagcccgccgctggcgggtagaaatcatgagcgccagcgagggtgaacatggtggttataaagagatcatcgccaaaattagcggtgatggtgtgtatggtcgtctgaaatttgaatctggcggtcatcgcgtgcagcgtgttcctgctacggaatcgcagggtcgtattcatacttctgcttgtaccgttgcggtaatgccagaactgcctgacgcagaactgccggacatcaacccagcagatttacgcattgatactttccgctcgtcaggggcgggtggtcagcacgttaacaccaccgattcggcaattcgtattactcacttgccgaccgggattgttgttgaatgtcaggacgaacgttcacaacataaaaacaaagctaaagcactttctgtactcggtgctcgcatccacgctgctgaaatggcaaaacggcaacaggccgaagcgtctacccgtcgtaacctgctggggagtggcgatcgcagcgaccgtaaccgtacttacaacttcccgcaggggcgcgttaccgatcaccgcatcaacctgacgctctaccgcctggatgaagtgatggaaggtaagctggatatgctgattgaaccgattatccaggaacatcaggccgaccaactggcggcgttgtccgagcaggaataatggaatatcaacactggttacgtgaagcaataagccaacttcaggcgagcgaaagcccgcggcgtgatgctgaaatcctgctggagcatgttaccggcagagggcgtacttttattctcgcctttggtgaaacgcagctgactgacgaacaatgtcagcaacttgatgcgctactgacacgtcgtcgcgatggtgaacccattgctcatttaaccggggtgcgagaattctggtcgttgccgttatttgtttcgccagcgaccttaattccgcgcccggatacggagtgtctggtggagcaggcactggcgcggttgcctgaacaaccttgccgtattctcgatctcgggacgggtaccggggcgattgcgcttgcgctggctcgcgagcgcccggactgcgaaattaccgctgtagatcgtatgcccgatgctgtcgccctggcacaacgtaatgcccagcatctggcgatcaaaaatatccacattctgcaaagcgactggtttagcgcgctagccgggcagcagtttgcgatgattgtcagcaatccgccgtatattgacgagcaggaccctcatcttcaacaaggcgatgtccgctttgagccgctcactgcgctggttgcggcagacagtggaatggcagacatcgtgcatatcatcgaacagtcgcgtaacgcgctggtatccggcggctttctgcttctggaacatggctggcagcagggcgaagcggtgcgacaggcatttatcctcgcggggtatcatgacgtcgaaacctgccgtgactatggtgataacgagcgcgtaacgctcggccgctattatcaatgacaagtttttctacactgcttagtgttcatcttattagtatcgcgctttctgttgggctattaaccttacgtttctggctacgttatcagaagcatccacaggcatttgctcgctggacgcgcattgtgccgccggttgtcgatacggtgttattgttaagcggcattgcgttgatggctaaagcgcacatcctgccattttccgggcaggcacagtggctgactgaaaagctgtttggagttatcatttatatcgttttgggttttattgcactcgattatcgtcgtatgcacagtcagcaggcgcgcattattgccttcccgctgacgttggtggtgctgtacatcatcattaaactcgccaccacaaaagtaccgttactggggtaagtcatgagatcgttagctgatttcgaatttaataaagcgccattgtgcgaaggcatgatcctggcttgcgaagcaatccgccgcgattttccctcgcaagatgtttacgacgaactggagcgtctcgttagtctggcgaaggaagaaatcagccagcttctgcctttagaagagcagctggaaaaactgatcgcgctgttttacggcgactggggatttaaagcctcacgcggcgtttatcgtctttccgatgcattatggctggaccaggtgttaaagaatcgacagggcagtgcggtatcattaggtgcggttttattatgggtcgcgaatcgtctcgatttgccgctgctgccggtgattttccctacgcagctgatattgcgcattgaatgtccggatggcgaaatttggctgattaatccttttaacggtgaatcgttaagcgaacatatgctggacgtatggttaaagggaaatatcagcccgtcggcggaactgttttatgaagaccttgatgaagctgataacattgaggtaatccgcaaattgctggatacactcaaagcctcgttgatggaagaaaatcagatggagctggcgttacgcaccagcgaagctttattacaattcaacccggaagatccctatgaaattcgngatcgcgggttgatttatgcgcaactggattgcgaacacgttgcgttgaacgatttaagttatttcgttgaacagtgtccggaagacccgatcagcgaaatgatccgtgcgcaaataaataacatcgcgcataaacatattgtgctgcattaattaatcgacattttactcaaggttaaggcgatcctatgaaacaaaaagtggttagcattggcgacatcaacgtagcaaatgacctgccgttcgtactgtttggcggtatgaacgtgctggaatctcgcgatctggcgatgcgcatttgcgagcactacgtaaccgtgacccagaaactgggtatcccttacgtgttcaaagcctcttttgacaaagccaaccgctcctccatccactcttatcgtggaccgggcctggaagaagggatgaaaatcttccaggagttgaagcagacttttggcgtgaaaattatcaccgacgttcacgaaccaagtcaggcacagcccgttgctgatgtcgtggatgtgattcagttgccggcgtttcttgctcgccagactgacctggttgaagccatggcgaaaaccggtgcggtaattaacgtcaagaaaccacagtttgtcagcccgggacagatgggtaatatcgttgataaattcaaagaaggcggcaacgaaaaagtgattctttgcgatcgtggtgctaacttcggctatgacaacctggttgtcgatatgctgggcttcagcattatgaagaaagtgtctggtaactcgccggtgattttcgacgtgacccacgcantgcaatgccgcgatccttttggcgcagcttccggcggtcgtcgtgctcaggtggctgagctggcacgagccggtatggcggtaggtctggcggggctgtttattgaagcgcatccggatccggaacatgcgaaatgtgatggtccatccgcgctgccgctggctaaactggaaccgttcctcaagcagatgaaagcgattgatgatctggtgaaaggtttcgaagaactggataccagcaagtaatcttttttgcttgaaaaataaagtcttagcgttctgcgttaagacttttttcatgggtgccggatacaaaaaaggccgcaggctgttaccctgcggccggtttcgggcgcatattgccatcacggcagcctgacgcccgttttcgccttacttccggttacgccaccagccgacaatcgctgcggtaataattcccgccaggatcggtgctgccaggtcgtgccagaaaatcatggcaaactgcgcgagcgtcatatagccgccttgttgtaatgacaacattttgcggctattcttgaattgttgatggttcaagattagcccccgttctgttgtcaggttttacctctcaacgtgcgggggttttctctttccagcaaccaatgccaccagggataaagcccccgcaacattgcgcctcaccggataacgccggcttggtgtggatactacgactcaattcatcttcacttcatccctgaaatgtttgcaatgaagagtgcattccggtttttcaacagctgttacagtcgtttcatgagtgctctggatgatgcttccagctcgggttgccaatatttacttgtggaagtgataaagacaaaaatggccgcaggctgttacccctgcggccggtttcgggcgcatattgccatcacggcagcctgacgcccgttttcaccttacttccggttacgccaccagccgacaatcgctgcggtaataattcccgccaggatcggtgccgccaggtcgtgccagaaagtcatggcaaactgcgcgagcgtcatatagccgccttgttgtaatgacaacattttgcggctattcttgaagtgtctggtttcaagattagcccccgttttgttgtcaggttttacctctcaacgtgcgggggttttctctttccagcaaccaatgccaccagggataaaacccccgcaacattgcgcctcaccggataacgccggcttggtgtggatactacgtctcaattcatcttcacttcatccctgaaatgtttgcaataaagagtacattccggcttttcaacagctgttgcagtggtttcgtgcaggttgtggtacaggctcgcaattctgattaacgaccnnccaggtagtatgaagaaatacaataagcaggaatttatattatctcccccggtttccgtcatcggaggagatataactgtcaggcaaatatcgtcatcaaataggcggcaaacagtgccagatgcgctgcgccattgagcacgttagtacgtccggtggagaaggagatatggcacagcactaaagaggccaccatcaccaccatttctggcgcaccaagtgcaaactgcaattcgttacccgtcataaaggcaattagcgtgacgacaggtacggtaagcgaaattgttgctaacactgaaccaaagaacagattcatcgcgcgctggacctggttgttcaacactgcttttaatgcacctaaaccttccggcgacagaatcaacagtgccaccaggaagccagtaaaggcgacaggggcattcatgctgtcgagcaaagtctccagcgggctggcgttcattttggtgactgcaataacggcaatcaggtggataatcaaccagatagcatgccacaggctgctatgggcagacggtttaccgtggtgcgggtcgtcgtcatcactgtcatcttcgtgctcgtagacaaacaaactttgatgcgttttggtctggatcagcaaaaatacaccatacattgccgcagaaattaatgctaccagtaacgcctgaccggttgaaaaattcgccgcaggcagagccattggaaataccagtacgattatcgccagggggaacagcgcaattaaatactgcttaataccaaacagattcatatattgggtggcaaacttacgaccgcccaacaataatgaaaagccgaccagcccaccggtaacaatcataatgatcgaatagagcgtatcacgcattagcgttggcgcggcgtcgccggttgccattaaagctgaaatcaaactaacttcaagaataaccactgaaaggctaagaataagcgaaccgtaaggttctcccaggcgatgggctaatacgtccgcatgacggacaacactaaaggcgctacttaaaataccaataagcgcaagaagattgatggcaatgaccactggtagtgtctggctgcttccccacaggaacagcactaccagcgccagaaccgggaaaataagcgaagtctccttgtggcgggtttttaccgcctcttgagcatttgacattatggttatccctttgcagatgaatttatcgaaaatgtaaaaaataggtaggaaaaataacagaaagtgtctggatatcggtaacattttacgaatttttaccccgttgtcgattttttactcattggggcataaaaataagtattacgtttaggcaatgtttgttttagcgtttcttaagaacagtctgacatgaaaattcttatgtttttgcaagagtagatattgttgaccacacttaatgttcaactttgtaaaaggagtcaacgatgccgtataaaacgaaaagcgacctgccggaaagcgtaaagcacgttctaccgtctcatgcccaggatatctataaagaagcgttcaacagcgcatgggatcaatataaagataaagaagatcggcgtgatgacgccagtcgcgaagaaaccgcgcataaagtggcctgggctgctgtgaagcatgaatatgccaaaggggatgatgataaatggcataaaaaatcgtaaaaccggtagcttagttaaagctattcgtgcggtgttgccttgcaagtggtccgcggattgcatattgtcccgttagtggtttcaaaatgagcagtaaaaatgtccggaagacaccaaaaagttgtcgcagggaagcatgcagtggcggaggtgtaagaaggtgataacgcgtgatttcttgatgaatgccgattgtaaaacggcatttggtgccattgaagaatcactcttatggtcagcagaacaacgggcggcttcgctggcggcgacgctggcttgtcgacctgatgagagaccggtgtggatcttcggttatggatcgttgatgtggaatccggcactggagtttaccgagtcgtgcaccggtacactggttggatggcatcgcgcgttttgcctgcgcctgaccgccgggcgcgggactgcgcaccagccgggacggatgcttgcactaaaagagggcggacgtaccacaggcgtcgcctatcgactgccagaagagacgctggagcaggaactaaccctgttgtggaagcgcgagatgattaccggctgttatctgccaacctggtgtcagcttgatcttgatgatggacgcacagtaaacgccattgtgtttattatggacccgcgacatccagaatatgaatctgacactcgcgctcaggtcatcgcgccgttgattgcggcggcgagcggtccgctgggaaccaacgcacaatacctgttttcactggaacaggagcttatcaaactgggaatgcaggacgatgggctgaatgatttgctggtatcggtaaaaaaactgctggcggagaattatccggatggtgtgttgcggccgggattcgcctgagtaaacttccctcatcgtggggcgtcagacnncccctcaaacattaaaatgtgagcactttatcggctgacagcgtccattgcgccagttccacaagagtaccgatttccaccccatcaatcagaggaagtgtactaatcccgcgcccgtcggtacaggttttgcacaatttcaccggtacattctgagcggtaaggatctccagcatttgctgtatgttgtagccttcccctggtttttgcccgcgcaacccggctgtgaccgcatcagacatcaggaacagacgcagatccagattgctctcctgctctcgtaacgcaatggccagccgcaagctgttaaacaaggattcgctcccgtaaggtgcgccattggcaacgatcacgattttttgcattatttactcctgtattcagggaattagacactcatcttctatcttactgcttctgcagcgtctgaccaatcggtcacatttttaaggattttcctgaaagcgcgagaaaatacgacaaaagttgccagtaatcgttattctttaaggctatgttttttcattttttaccggaagtnaccgacgttttgagccgtttcgttcctcgcattattccgttttatttactcttgctggcggcaggcggtacagctaacgcacaatctaccttcgagcaaaaagcggcaaatccctttgataataacaatgatggtctgccggatttaggcatggcgcctgaaaatcatgatggggaaaaacactttgctgaaattgtgaaagatttcggcgaaaccagtatgaatgataacgggctggatactggcgagcaggcaaaagctttcgcattgggaaaagtccgcgacgcgcttagtcaacaggttaatcagcacgtagagtcgtggctatcaccgtggggaaatgccagtgttgacgtcaaagtggataacgaaggtcattttaccggcagtcgtggaagctggtttgtgccgttacaagataatgatcgttatctcacctggagccagcttggtcttactcagcaggatgatgggctggtgagcaatgtgggcgttgggcaacgctgggcgcgcggcaactggctggtgggttataacactttttatgacaacttgctggatgaaaatcttcagcgagcgggctttggnnnngaagcgtggggcgaatatttgcgactatcggcaaacttttatcagccgtttgctgcatggcatgaacagacagccacgcaggaacaacggatggcgcgcgggtacgacctgacagcccggatgcgcatgccgttctatcaacacctcaataccagtgtcagcgtagaacagtattttggtgatcgtgttgatttgtttaactctggtacgggttatcacaatcccgtcgcgttgagtctgggattaaattacacccctgtgccattagtcactgtgacggcccagcataaacagggtgaaagtggcgagaatcaaaataacctcgggctgaatcttaattaccgctttggtgtaccgctcaaaaaacaactttctgcgggcgaggttgccgaaagtcagtcgttacgtggtagtcgctatgataatccgcagcgaaataatctaccgactcttgagtaccgacagcgaaaaacgttaacggtgtttcttgcgacaccgccgtgggatctaaaacctggcgaaacagtgccgctgaaattacaaatccgcagtcgttacggtattcggcaactgatttggcagggcgatacgcagatattaagtttgacgccgggcgcacaagccaacagcgcggagggctggacgctgatcatgcctgactggcagaacggggaaggggcgagcaatcactggcgattgtcggtggtggtggaagataaccaggggcagcgtgtctcctccaatgagatcacgctaacgcttgtcgaaccgttcgacgcattgtcaaacgacgaactgcgctgggaaccgtaatcagaaaatgcgctcctgatgcacccataccgctgcttccacgcgagacttgagcttcattttcttcagcatgtgcttgacgtgcacttttactgtgctttcggtgatgtccaggcggcgggcaatcatcttgttcggcaaaccctgggcaatcagcttgagaatatcgcgctcgcgtggggttaactggttaacatcgcgctcagtcgtggcacggttagcgcgcaagctggcggccagaacaggcgttaatgcttcgcttaataccatttcgccagcagctgcctgatgcaatgctttcagcagatcttccggttccatatcttttaacagatagccatccgcgccgcgtttcagtgcggtgaccacatcttcttcatggttagagacgctgaataccacaatgcgccctgagagggacttttcgcgcagtttatccagcgtttccagaccgttcatgccgggcatattgagatctaacaggatcagatcgggatcaagagattccgccagttcaataccctgttcgccattactcgcttcgccaaccacggtgatatctggtgccatactgataagctgttttacgccagttcgcagcatcgggtgatcgtcaatcagcaggatagtagccggttcctgattactcatgggtatctccttggacgtctgtgaaagttttttcgggaataaaggtgaccaccacttcggtgccacctgattcacgacggcggacgcggcaatcgcctcgtaaactttgcgcacggtcgcgcattattatcatgccgtagtgattgctgcggatggcattttcaggcacgccgcagccgttatcctggacggtcagtttgacctgattatcgttttgcgccacngtcaccacgacctcactcgcttgcgaatgtttgagggcgttacttaatgcctcacgggcaatttgcaacaagtggattgcctgatgcgaaggcaccagacgaggcggcaattgataatccagcttcaccgggaagccaaatttggcgctgtactcttcgcaactcgcctccagcgccggacgtaatccaggctcggtgagctgcaagcggaatgtggtgagcaattcacgcaactgcgcccaggatgcattcagttcgttacggatctgacttaacagttcgcggctgctttctggcagcgcatcgccctgcatctgtaaacaactcacctgcatcttcatgcaagagagagattgggcaatagaatcatgcagttcgcgcgcaatggtggcacgctcttccatcacgatcaactgttgctgacgttcctgatgccgatccagcgccagcgtggcggtgagttgttcaaccagggtatccaccagttgttgttgatcatggctaagatgacgcccctgcggtagggtcgccagcaaaataccgtactgcgtatgagagtcagccagccgccacttcagggtcgtgccgcgatcaccaacgggtaatacgccgcgcgggcagagctggcagcctttatcatcacaagtcatatctggctggcaggtaaactcctgatgattctcttcatcatcagtgtcatacacccgcagttcgatatcacgtagcagggttaaattctgtaagccgttgagtacaggtgacaggcgttcacacagcggggcgcgggaatgcaaacggcggttagcctgccataaaaaagagaggatctgatttttatgctccagcccggcggttttctcctgaacccgctgctcaagtacggcataactttcggccagttctgcagacatattgttcaacgcagttccaagcatcgccatttcgttgcgcccgctgatgtttgcgcgttgggtaaaatcgcgatggctgacggcactcgccattgccagcagttgccgccacggttgtagcagtcgcgcccgcaaccagataatagtgaacaccagtaaaagtgccataaataccgccattacccgatggaccagtaccactgtctcaatgcgcatttccgtggtgcggtcaaaaccagataccagctgatcaagcccggcaacaaactggctgacatccgctgacaccgtttcgcggttttgtgcacgcatcagtgcagggatgagttcattacgccagtaatcttgtaaaccctgtaattgcgccagttgtccgtctcgttctgctgctcgagtcaactcggcgctaaatgccgtttgttccatctctttaattaagggnttgtctttctcgcttaatggcactgctgccaacagacggtaactttgcatgcgcagcgatcccgctttgttgatcgcatgggcgctgccctgaacgccttgcaccagccagccagaaaccgccatccctgccagtccaatagcagtagaaagcaacacaataagcgcaacctgattaaccagggtgagcggagagagacaacgtttaagcatgtaaacctcttccttcaggctttaaatgagcaataaccttaatgaatgtgacgatacattctggaatggcagtattctcggctattggctgaagtatacccatacccggaaagagttactccttatttgccgtgtggttagtcgctttacatcggtaagggtagggattttacagcaccgtgaaaaatctcataatttttatgaaatcactgtactcactatgggtaatgataaatatcaatgatagataaagttatcttatcgtttgatttacatcaaattgcctttagctacagacactaaggtggcagacatcgaaacgagtatcagaggtgtctatgagtcactcatccgcccccgaaagggctactggagctgtcattacagattggcgaccggaagatcctgcgttctggcaacaacgcggtcaacgtattgccagccgcaacctgtggatttccgttccctgtctgctgctggcgttttgcgtatggatgttgttcagcgctgttgcggtgaacttaccgaaagtcggttttaattttacgaccgatcagctatttatgttgactgcgctgccttcggtttctggcgcgttattacgtgttccatactcctttatggttcctatcttcggtggtcgtcgctggacggcgttcagcaccggtattctgattattccttgtgtctggctgggttttgccgtgcaggatacctccacgccttatagcgtcttcatcatcatctctctgctgtgcggctttgctggcgcgaacttcgcatccagtatggcaaacatcagcttcttctttccgaaacagaagcagggtggcgcgctgggcctgaatggtggtctgggcaacatgggcgttagcgttatgcagttggttgctccgctggtggtatcactgtcgattttcgcagtatttggtagccagggcgtcaaacagccggatgggactgagctgtatctggcgaatgcgtcctggatatgggtgccgttccttgccatcttcaccattgcggcgtggtttggcatgaacgatcttgctacctcgaaagcctccatcaaggagcagttgccggtactcaaacggggtcatctgtggattatgagcctgctgtatctggcaaccttcggttccttcatcggcttctccgcgggctttgcgatgctgtcaaaaacgcagttcccggatgttcagattctgcaatacgctttcttcgggccgtttattggtgcgctggcgcgttctgcaggtggtgcattatctgaccgtctgggcggaactcgtgtcacgctggtgaactttattctgatggcgattttcagcggcctgctgttcctgaccttaccgactgacgggcagggcggaagcttcatggcgttcttcgcggtcttcctggcgctgttcctgacagctgggctgggtagtggttccactttccanatgatttccgtgatcttccgtaaactgacaatggatcgcgtgaaagcagaagggggttctgacgaacgtgcgatgcgtgaagcggcaaccgacacggcggcggcgttgggtttcatctctgcgattggcgcgattggtggcttctttatcccgaaagcgttcggtagctcgctggcattaacgggttcgccagtcggcgcaatgaaagtatttttgattttctatatcgcctgcgtagtgattacctgggcggtatatggtcggcattctaaaaaataaatcttaatatttgattatcctttgcgcggcatgatgtcgcgctttttttatgcgtcatttagttacaacatactaatgttatatggtttatttcgccggatttcattaagagccattaatatgttacccatggggaatactccttaatacccatttgcataaaaatcttaatagtttaaataactacaggtataaaacatcttaatttacagtatgttatgctgtaactgttaattatcctaaaggggtatcttaggaatttactttatttttcatccccatcactcttgatcgttatcaattcccacgctgtttcagagcgttaccttgcccttaaacattagcaatgtcgatttatcagagggccgacaggctcccacaggagaaaaccgatgagtaaattcctggaccggtttcgctacttcaaacagaagggtgaaacctttgccgatgggcatggccagcttctcaataccaaccgtgactgggaggatggatatcgccagcgttggcagcatgacaaaatcgtccgctctacccacggggtaaactgcaccggctcctgcagctggaaaatctacgtcaaaaacggtctggtcacctgggaaacccagcagactgactatccgcgtacccgtccggatctgccaaaccatgaacctcgcggctgcccgcgcggtgccagctactcctggtatctttacagtgccaaccgcctgaaatacccgatgatgcgcaaacgcctgatgaaaatgtggcgtgaagcgaaggcgctgcatagcgatccggttgaggcatgggcttctatcattgaagacgccgataaagcgaaaagctttaagcaggcgcgtggacgcggtggttttgttcgttcttcctggcaggaggtgaacgaactgatcgccgcatctaacgtttacaccatcaaaaactacggcccggaccgtgttgctggtttctcgccaattccggcaatgtcgatggtttcttacgcatcgggtgcacgctatctctcgctgattggcggtacttgcttaagcttctacgactggtactgcgacctgcctcctgcgtctccgcaaacctggggcgagcaaactgacgtaccggaatctgctgactggtacaactccagctacatcatcgcctggggttcaaacgtgccgcagacgcgtaccccagatgctcacttctttactgaagtgcgttacaaaggcaccaaaactgttgccgtcacaccagactacgctgaaatcgccaaactgtgcgatctgtggctggcaccgaaacagggcaccgatgcggcaatggcgctggcgatgggccacgtaatgctgcgtgaattccatctcgacaacccaagccagtatttcaccgactatgtgcgtcgctacaccgacatgccgatgctggtgatgctggaagaacgcgacggttactacgctgcaggtcgtatgctgcgcgctgctgatctggttgatgcgctgggccaggaaaacaatccggaatggaaaactgtcgcctttaataccaatggcgaaatggttgcgccgaacggttctattggcttccgctggggcgagaagggcaaatggaatcttgagcagcgcgacggcaaaactggcgaagaaaccgagctgcaactgagcctgctgggtagccaggatgagatcgctgaggtaggcttcccgtactttggtggcgacggcacggaacacttcaacaaagtggaactggaaaacgtgctgctgcacaaactgccggtgaaacgcctgcaactggctgatggcagcaccgccctggtgaccaccgtttatgatctgacgctggcaaactacggtctggaacgtggcctgaacgacgttaactgtgcaaccagctatgacgatgtgaaagcttataccccggcctgggccgagcagattaccggcgtttctcgcagccagattattcgcatcgcccgtgaatttgccgataacgctgataaaacgcacggtcgttcgatgattatcgtcggtgcggggctgaaccactggtatcacctcgatatgaactatcgtggtctgatcaacatgctgattttctgcggctgtgtcggtcagagcgggggcggctgggcgcactatgtaggtcaggaaaaactgcgtccgcaaaccggctggcagccgctggcgtttgccctcgactggcagcgtccggcgcgtcacatgaacagcacctcttatttctataaccactccagccagtggcgttatgaaaccgtgactgcggaagaactgctgtcgccgatggcggataaatcccgctataccggacatctgatcgactttaacgtccgtgcagaacgcatgggctggctgccgtctgcgccgcagttaggcactaacccgctgactatcgctggcgaagcagaaaaagccgggatgaatccggtggactatacggtgaaatccctgaaagagggttctatccgtttcgctgcggaacagccggaaaacggcaaaaaccacccgcgtaacctgtttatctggcgttctaacctgctcggttcttccggtaaaggtcatgagtttatgctcaagtacctgctggggacggagcacggtatccagggtaaagatctggggcagcagggcggcgtgaagccggaagaagtggactggcaggacaatggtctggaaggcaagctggatctggtggttacgctggacttccgtctgtcgagcacctgtctctattccgacatcattttgccgacggcgacctggtacgaaaaagacgacatgaatacttcggatatgcatccgtttattcacccgctgtctgcggcggtcgatccggcctgggaagcgaaaagcgactgggaaatctacaaagccatcgcgaagaaattctccgaagtgtgcgtcggccatctgggtaaagaaaccgacatcgtcacgctgcctatccagcacgactctgccgctgaactggcgcagccgctggatgtgaaagactggaaaaaaggcgaatgcgacctgatcccaggcaaaactgcaccgcacattatggtcgtagagcgcgattatccggcaacttacgaacgctttacctctatcggcccgctgatggagaaaatcggtaacggcggtaaagggattgcctggaacacccagagcgagatggatctgctgcgtaagctcaactacaccaaagcggaaggtccggcgaaaggccagccgatgctgaacaccgcaattgatgcggcagagatgatcctgacactggcaccggaaaccaacggtcaggtagccgtgaaagcctgggctgccctgagcgaatttaccggtcgtgaccatacgcatctggcgctgaataaagaagacgagaagatccgcttccgcgatattcaggcacagccgcgcaaaattatctccagcccgacctggtctggtctggaagatgaacacgtttcttacaacgccggttacaccaacgttcacgagctgatcccatggcgtacgctctctggtcgtcagcaactgtatcaggatcaccagtggatgcgtgatttcggtgaaagcctgctggtttatcgtccgccgatcgacacccgttcggtgaaagaagtgataggccagaaatccaacggcaacccggaaaaagcgctcaanttcctgacgccgcaccagaagtggggtntccactccacctacagcgacaacctgctgatgctgactttaggtcgcggtggtccggtggtctggttgagtgaagccgatgccaaagatctgggtatcgccgataacgactggattgaagtattcaacagcaacggtgctctgactgcccgtgcggttgtcagccagcgtgttccggcagggatgaccatgatgtaccacgcgcaggaacgtatcgttaacctgcctggttcggaaattacccaacagcgtggtggtatccataactcggtcacccgtatcacgccgaaaccgacgcatatgatcggcggctatgcccatctggcatacggctttaactactacggcaccgtaggttctaaccgcgatgagtttgttgtagtgcgtaagatgaagaacattgactggttagatggcgaaggcaatgatcaggtacaggagagcgtaaaatgaaaattcgttcacaagtcggcatggtgctgaatctcgataagtgcatcggctgccacacctgttcagttacctgtaaaaacgtctggaccagccgtgaaggcgtggaatacgcgtggttcaacaacgtggaaaccaagccgggccagggcttcccgactgactgggaaaaccaggaaaaatacaaaggcggctggatccgtaaaatcaacggcaaactgcaaccgcgcatgggtaaccgtgccatgctgctgggtaaaatcttcgctaacccgcatctgccggggatcgacgattattacgagccgttcgattttgactatcagaacctgcataccgcgccggaaggcagcaaatcgcagccgattgcccgtccgcgttcgctgattaccggggaacggatggcgaaaatcgaaaaagggccgaactgggaagatgacctgggcggtgagtttgacaaactggcgaaagacaagaacttcgacaacatccagaaggcgatgtatagccagttcgaaaacaccttcatgatgtatttgccgcgcctgtgcgaacactgcctgaacccggcatgtgtggcgacctgcccgagcggtgcgatttacaagcgtgaagaagatggcatcgtcctgatcgaccaggataaatgccgtggctggcgtatgtgcatcaccggatgcccgtacaaaaaaatctacttcaactggaagagcggtaagtctgagaagtgcatcttctgctatccgcgtattnnagcgggtcagccgaccgtgtgctcagaaacctgtgtcggtcgtatccgttatcttggcgtgctgctgtacgatgccgacgcgattgaacgtgcagccagcaccgagaacgagaaagatctctaccagcgtcagctggaggtgttcctcgatccgaacgatccgaaagtcatcgagcaggcgattaaagacggtattccgctgagcgttattgaagctgcacagcagtcgccggtttataaaatggcaatggaatggaaactggcgctgccgctgcatccagaatatcgcacactgccgatggtctggtacgtgccgcctctgtctccgattcagtctgcagcagacgcgggtgagctgggtagcaacggcattctgccagacgtcgaaagcctgcgtattccggtacagtatctggcgaatctgctgaccgccggtgataccaaaccggtactgcgcgcgctgaaacgtatgctggcgatgcgtcattacaaacgtgctgaaaccgttgacggtaaagttgatacccgtgcgctggaagaggtcggtctgaccgaagcccaggcacaggagatgtaccgttatctggcgattgctaactacgaagatcgctttgtggtgccgagtagtcatcgtgaactggcacgggaagccttcccggagaaaaatggctgcggctttacctttggtgatggctgccacggttcagataccaaattcaatctgttcaacagccgtcgtatcgatgccatcgatgtgaccagcaaaacggagccgcatccatgatcgaactcgtgattgtatcgcgtctccttgaatatccggatgctgccttatggcagcatcaacaagagatgtttgaggcgattgccgcgtcgaaaaatctgccaaaagaggatgcccatgcgctgggcattttcctgcgcgatttaacgacgatggatccgctcgatgcccaggcgcagtacagcgaactgttcgaccgtggccgcgccacgtcactgttgctgtttgaacatgtgcacggngaatcccgcgaccgcggccaggcgatggtggacctgctggcgcagtacgagcagcacggcttgcagttaaacagccgcgaattgccggatcatctgccgctgtatctggagtacctggcgcagctgccgcaaagcgaagccgtggaaggtttgaaagatatcgcgccgattctggcattgctgagtgcgcgtctgcaacagcgtgaaagccgttatgccgtgctgtttgatctgctgctgaaattggccaataccgctatcgacagcgacaaagtggcggaaaaaattgccgacgaagcgcgcgatgatacgccgcaggcgctggatgctgtttgggaagaagagcaggttaaattctttgctgacaaaggctgcggtgattcagcaatcactgctcatcngcgtcgctttgccggtgccgtcgcgccgcaatatctgaatatcaccaccggaggacagcactaatgcaattcctgaatatgttcttctttgatatctacccgtacatagccggggcggtcttcctgattggtagctggctgcgttatgactacgggcagtacacctggcgcgcggcgtccagccagatgctggatcgcaaagggatgaacctggcgtcgaacctgttccatatcggtattctggggatttttgtcggtcacttcttcggtatgttgacgccgcactggatgtatgaagcctggctgccgattgaagtgaaacagaaaatggcgatgtttgctggtggtgccagcggcgtgctgtgtctgattggcggcgtgcttttgcttaaacgtcgtctgttcagcccacgcgtgcgtgcaacgactaccggagcggatatactgatcctgtcgctgctcgttatccagtgcgcgctgggcctgttgaccattccgttctccgcccaacatatggacggtagcgagatgatgaaactggttggctgggcgcagtcggtagtgaccttccacggtggcgcttctcaacacctcgatggtgtggcgtttatcttccgtctacacctggtgctggggatgacgttattcctgctgttcccgttctcgcgtctggtacacatctggagcgtaccggtggagtatctgacacgtaagtaccagctggtgcgcgctcgtcactaagcgaattttagttcacatagaccctgcttcggcggggtttttttatgggcacggtgcggggtgagttgtcggatgcgcttcgcttatccgacctacaagggaggatattgtaggtccggtaaacgtggtgccattgggcaaaattagctcggagtaacaggttttgattatttcaggaagcgatggtggtgggggaaggattactcagcgctgcgcgcttcgcccttcgggtcgttgcctgcggcaacgctctctcgctggcgctcgagtcgaaccttagtcgaagcttctcatccttctccgcttgggcagaatatttatttacggattcgcttgagagttcagggacttttgaaagtgatggtggtgggggaaggattcgaaccttcgaagtcgatgacggcagatttacagtctgctccctttggccgctcgggaaccccaccaggggtaattcaaattttgaggtaatgcttgagatggcggtgggggaaggattattcgtcgcttcgctcctcacccttcgggccgttgcctgtgaaaacgttctctcgctttcgctcgagtcgaaccttagtcgaaggttctcacccttccccgatgagtgcaaactttcacaatctcaccgaagttaccacatcgctgtggtgaatcatggtggtgggggaaggattcnnnnnnnngaagtcgatgacgnnagatttacagtctgctccctttggccgctcgggaaccccaccacggggtaatgctttttactggcctgctcccttatcgggaagcggggcgcatcatatcaaatgacgcgccgctgtaaagtgttacgttgagaaaaatgaactggttgcgtaattttcatccgtaacggattaaaggtaaccagttatttttgctggcgattaaagaataatcgtccgattaccgtaaacaaagacgcgctgcgccagtactttgtagagcgcgcgacttaagacgtttttctcgacgtcacgacctgcgcgcatcatatcttcagctgtgtaggtatgatcgacatgaataacgtcctgcatgatgattgggccttcgtccagattgtcattcacatagtgagcggttgcgccaataatcttcacgccacgttcataggcctggtgataaggacgtgcgccgataaacgctggcaggaaggaatggtgaatattgatgatcttattcgggaagcgtgacacaaattccggtgttaatacccgcatatacttcgccagcaccacgtagtcaggttgataagcatcaatggcatccgccatcttttgatcgtgctcgttgcggcttaacccttcatggcttaccagctcaaacggtatatcaaaacgctcaaccagagaacgtaaagtatcgtggttaccaatcactgccgcgatttcgacatccaggccgccataattggctttcatcaacaaatcgccaaggcaatgcgcttctttagtgaccagaatcactatccggcgacgaccggcaggattcagctcacgcacggagccttctggcaatgcgctatcganatccgccagcagggtggaatcattaaaaatcccttccagttccgtgcgcataaaaaagcgcccggtacggtgatcaacaaattcattgttctgtacgatatttaactcgtgcttgtagcaaatattggtaatacgtgcgatcagacctttttggtccggacaaatagtacgcagaactttacgttggagtgaatgcattgctggaaaaacnttgttgagagtgtttgntaaaccgtaccgtcaaccattattggccgcagcactttttaaattttttacctgaaccacaagggcagggatcgttgcggccaaactgcggacgtgtaccgtcaatatagtaccattgaccgttttctttcaaaaatcgcgaacgttcaattattgcacctgttttgccaccttcggtaaatcgagcaacaaaactgacaaatccgatattgtcggcgtcctgccaacaatgttcaaatacggtcaatcccaaccattcagtatgcgcaaatccggcaatcaattcggcacgtaacgccgctgctccacaagatggatgccaggtctttattaaataatctgcgtcttgcatcacaaaagcgcagtaacgcgaacgcatgagatgttctggatcaggtgcaaccttttcaccagacacataagggtggcaacataggctatactcgacagcactaccacagggacaaagctgagacacaaataatctccctggaaacaataacggcgtattaaccgcctgagtagcactatgttaaccgagcagtagcgatgtggctacgattgcattccaggggaatcttgcgggaataatgagaaagataaaaatagggctggcgctgggatctggcgcggcgagaggttggtcgcatattggcgttattaatgcgctaaaaaaagtgggtattgaaattgatatcgttgcaggatgttcaattggttcgctggtgggcgcggcctatgcatgcgatcgattatctgcgctggaagattgggtgacctctttcagttattgggatgttttacgactgatggatctctcctggcagcgcggtgggttactgcgcggcgagcgtgtcttcaatcaataccgcgaaataatgccggaaacagagatcgaaaattgttcccgtcgcttcgcggctgttgccaccaatttaagtactgggcgtgaattatggtttactgaaggcgatctccatcttgctattcgcgcatcatgcagtattccaggactaatggcacccgttgcgcataacggctactggctggttgatggggcagtcgttaacccaattcctatttcgctcacgcgtgcattgggtgctgatattgtgatagcggtcgacctgcagcacgatgctcatttgatgcaacaagatttgctctcctttaatgtcagtgaagaaaatagcgagaatggtgattctctgccgtggcatgcgcgtctgaaagaaaggttaggcagtataacgacacgtcgggcggtgacagcaccaacggcaacagagattatgaccacttctatccaggtgctggagaaccgccttaaaaggaaccgcatggcaggtgatccgcccgatattctgattcaacctgtttgcccgcaaatatctacgcttgatttccatcgcgcgcacgctgccattgcggccgggcagctggcagtggaaaagaaaatggacgaacttttgccgttggtacgcaccaacatttgaccagaatttttatctacacttaagttaattctgacaggcgcaggtggcaatagcatgccactattgagtaaagccagtcaggggagagaacatgacgcagccattggtcggaaaacagattctcattgttgaagatgagcaggtatttcgctcgcttctggattcgtggttttcctcattgggagcgacaacggtactggcggctgatggggtggatgcccttgagttgctgggaggtttcactccagacctgatgatatgtgatatcgcgatgccacgaatgaacgggcttaaactgctggagcatatacgtaacagaggcgaccagaccccagttctggtgatatctgccactgaaaatatggcagatattgccaaagcgttacgtctgggcgttgaagatgttttgctgaaaccagttaaagatctgaatcgcttgcgcgagatggtttttgcctgtctctatcccagcatgtttaattcgcgcgttgaggaagaggaaaggctttttcgcgactgggatgcaatggttgataaccctgccgcagcggcgaaattattacaggaactacaaccgccggttcagcaggtgatttcccattgccgggttaattaccgtcaattggttgccgcggacaaacccggcctggtgcttgatattgccgcactttcggaaaacgatctggcattttattgccttgatgtaacccgagctggacataatggcgtacttgctgccttgttattacgcgcattgtttaacggattattacaggaacagcttgcacaccaaaatcaacggttgccagagttgggcgcgttattgaagcaggtaaaccatttactccgtcaggccaatctgccggggcagtttccgctattagttggctattatcatcgcgaactgaaaaatctcattctggtttctgcgggtctgaatgcgacgttaaataccggcgaacaccaggtgcaaatcagtaatggtgttccgttaggcactttaggtaacgcttatttgaatcaattgagccagcgatgcgatgcctggcaatgccaaatatggggaaccggtggtcgactgcgcttgatgttgtctgcagaatgagcaaacgataacgcgggctaaatttgcattaccagctaatgtcggctggtggtactatcgtcgccattcgtataagtaattgtcttaattatgctaactcgcatccttttcagaacttagcccctccggggtgctgatatactgggatgcgatacagaaatatgaacacgttcaaaacacgaacagtccaggagaatttaaatggctgccattaatacgaaagtcaaaaaagccgttatccccgttgcgggattaggaaccaggatgttgccggcgacgaaagccatcccgaaagagatgctgccacttgtcgataagccattaattcaatacgtcgtgaatgaatgtattgcggctggcattactgaaattgtgctggttacacactcatctaaaaactctattgaaaaccactttgataccagttttgaactggaagcaatgctggaaaaacgtgtaaaacgtcaactgcttgatgaagtgcagtctatttgtccgccgcacgtaactattatgcaagttcgtcaggggctggcgaaaggcctgggacacgcggtattgtgtgctcacccggtagtgggtgatgaacctgtggctgttattttgcctgacgttattctggatgaatatgaatccgatttgtcacaggataacctggcagagatgatccgccgcttcgatgaaacgggtcatagccagatcatggttgaaccggttgctgatgtgaccgcatatggcgttgtggattgcaaaggcgttgaattagcgccgggtgaaagcgtaccgatggttggcgtggttgaaaaaccaaaagcggatgttgcgccgtctaatctcgctattgtgggtcgttacgtacttagtgcggatatttggccgttgctggcaaaaacccctccgggagctggtgatgaaattcagctcaccgacgcaattgatatgctaatcgaaaaagaaacggttgaagcctatcatatgaaagggaagagccatgactgcggtaataaattaggttacatgcaggccttcgttgaatacggtattcgtcataacacccttggcacggaatttaaagcctggcttgaagaagagatgggcattaagaagtaacatccgtatcggtgttatccacgaaacggcgttgagcaatcgacgccgtttttttatagcttattcttattaaattgtcttaaaccggacaataaaaaatcccgccgatggcgggattttaagcaagtgcaatctacaaaagattattgcttgatcaggaaatcgtcgagggatttaccttgctcatccattgcttttttgattacagctggagtacggccctggccagtccaggttttagtttcgccgttttcgtcaacgtagctatattttgccggacgctgagcacgtttagctttggtgccagattttacggcggcaaggctattcagcagctcgttcgggtcaataccgtcagcgatcagcatttcgcgatattgctgcagtttacgagtgcgctcttcaacttcagcagcagccgcgctttcttcttcgcgacgttcgttaacaacaacttctaatttttccagcatttcttccagcgtttcaagtgtacattctcttgcctgcgcacgaagagtacggatgttgttcagaattttaagtgcttcgctcattgtagtaatctcaaacttatattggggtggtttgttgaggtaataatagagccttaaattcagttgtgcaatagccaggaatgtaaggaattcaaaattgttctttattnnnnnccgccaataaatatcttttcataaaattagccagaaaagacgcggcatatagccctatttgtaccgatgatttcgcagcacgtgaggttaaaacttcctgattcatgtcacattttatggggagattatcgtaggctgacgacctttcagtcttctgtattagtcgtgtttacgagaattccctattaagcgaatgatgaaaagtagaacagtcgcaataagagcagggacttagtattgcactatctcctggaggtcaacagagggctattacttgcgcaacaggttaaagattgtgaatagttaccagcagtcatttacccgcttataacaagcgaggcagttgtaatgatagctcagaaggattatgcaaggcttcgtaagggagaacgcatataccacttctgtgcatactgttgagctgaaaaactgacgaattatgataaactccagccaactttatttcatatcattgagggcctgtggctgatggcacagctatatttctactattccgcaatgaatgcgggtaagtctacagcattgttgcaatcttcatacaattaccaggaacgcggcatgcgcnctgtcgtatatacggcagaaattgatgatcgctttggtgccgggaaagtcagttcgcgtataggtttgtcatcgcctgcaaaattatttaaccaaaattcatcattatttgatgagattcgtgcggaacatgagcagcaggcaattcattgcgtactggttgatgaatgccagtttttaaccagacaacaagtatatgaattatcggaggttgtcgatcaactcgatatacccgtactttgttatggtttacgtaccgattttcgaggtgaattatttattggcagccaatacttactggcatggtccgacaaactggttgaattaaaaaccatctgtttttgtggccgtaaagcaagcatggtgctgcgtcttgatcaagcaggcagaccttataacgaaggtgagcaggtggttattggtggtaatgaacgatacgtttctgtatgccgtaaacactataaagaggcgttacaagtcgnctcattaacggctattcaggaaaggcatcgccacgattaataagaatttctttactgacagggtgagcagggcacttttatcctgtcagttcgttttacgcacttcttccgggctatacacccttctcggcagtttttaacgccgctatacgcctcacagggctcttaagcaccgacgttgacttgtgacctgtaaagtacaatatccctgtgtttaggcgttatacatcgtcgcaaatatgatgaaggctaatgctgtcggtttatggaaaagttgctttgggtaaacaaaaaaacggccccagaaggggccgtttatgttgccagacagcgctactgattaagcggattttttcgcttttttctcagctttagccggagcggcttcttttttcgctgcagtttcaccttctacataatcacgaccgtagtaggtatccagcagaatctgtttcagctcggagatcagcgggtaacgcgggttagcgccagtgcactggtcatcgaatgcatcttcagacagtttatccacgttcgccaggaagtctgcttcctgaacgccagcttcacggatagatttcggaatacccagttcagccttcagcgtttccagccatgccagcagtttctcgatcttagcagcagtacggtcgcccggtgcgctcagacccaggtggtcggcaatttcagcataacgacggcgagcctgcggacggtcatactggctgaatgcagtctgcttggtcgggttgtcgttcgcattgtagcgaataacgttacaaatcagcagggcgtttgccagaccgtgcggaatatggaactgggaacccagtttgtgcgccattgagtgacatacacccaggaaggcgttcgcaaacgcgatacccgcgatagtcgntgcactgtgaacacgttcacgcgctaccggatttttagacccttcgtggtaggacgctggcagatattctttcagcagtttcagtgcctgcagagcctgaccatcagagaactcagatgccagtacagaaacataagcttccatggcgtgagttactgcgtccagaccaccgaaagcacacagggacttcggcatgtccataaccaggttggcgtcgacaatcgccatatccggggtcagcgcatagtccgccagcgggtatttctgaccagtagcgtcgtcagttacaaccgcaaacggagtgacttcagaacctgtaccagaagtggtggtgacagcaatcattttcgctttcacgcccattttcgggaacttgtagatacgtttacggatatccataaagcgcagcgccagctcttcgaagtgagtttccggatgttcgtacataacccacatgatcttcgcggcgtccatcggggaaccaccacccagcgcgataatcacgtctggtttgaaggagtttgccagttctgcacctttacgaacgatgctcagggtcgggtccgcttctacttcgaagaagacttcagtttcaacgcctgctgctttcagtacggaagtgatctgatcagcataaccattgttgaacaggaagcggtcagtcacgatgagcgcacgtttgtggccatcagtaatcacttcatccagcgcgattggcagggagccacggcggaagtagatagatttcggaagtttgtgccacaacatgttttcagctcgcttagcaacggttttcttgttgatcaggtgtttcggaccaacgttttcagagatggagttaccaccccaggaaccacaacccagagtcagggaaggtgcgagtttgaagttatacaggtcaccgataccaccctgagaagccggggtgttaatcaggatacgagccgttttcattttctgaccgaagtaagaaacgcgagccggttggttatcctggtcagtgtacaggcaagaggtatgaccgataccacccatagcaaccagtttctctgctttttctaccgcgtcttcgaaatctttagcgcggtacattgccagagtcggggacagtttttcatgtgcgaacggttcgctttcatcaacaacggtcacttcaccgatcagaatcttggtgttttctggtacagagaagcctgccagttcagcaattttataggctggctgaccaacgatagccgcgttcagcgcaccgtttttcaggataacgtcctgaacagctttcagctctttaccctgcaacagatagccgccgtgggttgcgaaacgttcacgtactgcgtcataaacagagtcaacgacaacaacagactgttcagaagcacagattacgccgttgtcgaaggttttggacatcagtacagatgcaactgcacgtttgatatcagcagtttcatcgataacaaccggagtgttgcccgcgcctacgccgatagctggtttaccggagctgtatgcggctttaaccatgcccggaccaccagtcgcgaggatcaggttgatgtctgggtggtgcatcagtgcgttagacagttcaacagaaggttgatcgatccanccgatcagatctttcggagcaccggcagcgatagcagcctgcagaacgatatcagccgctttgttggtcgcatcttttgcacgcgggtgcggggagaagataatggcgttacgggtcttcagactgatcagcgatttgaagatagctgttgaagtcgggttagtggtcggaacgataccgcaaataataccgattggttcagcgatagtgatggtaccaaaagtgtcgtcttcagacagaacaccacaggttttttcatctttataggcgttgtagatatattcagaagcaaagtggtttttgatcactttatcttcgacgatacccatgccggattcggcaacggccattttcgcgagtgggattcgagcatctgcagcagccagagcggcggcgcggaagattttgtctacttgctcttgagtgaaactggcatattcacgctgggctttttttacacgctctacgagtgcgttaagttcagcgacattagtaacagccataatgctctcctgataatgttaaacttttttagtaaatcatctgctcgaatacgagagtatagtcagtgcggtgatgatttgcttaaccaatgaaaatcaaaagcttactcgcgcacacactcactgtgatttactaaaagagtttaaacattagagttattatctctaatgcgtcacttccaagtggcgtaagcaagattactcacttctgggtactgattacgtgatccaaatcaaatttttgcanagctgacacctttcagcatcgcttttcgccattatagctaacagttaataaattgtagtatgatttggtggctacattagcatgttttgcacaactagataacaataacgaatgatagcaattttaagtagttaggaggtgaaaaatgctgtcaaaaggcgtattgtcagcgcgtcttttcaaccttatttatggctaacattatccggcttttgcttcggagctaaccgtgattcagaccctttttgattttcccgtttacttcaaatttttcatcgggttatttgcgctggtcaacccggtagggattattcccgtctttatcagcatgaccagttatcagacagcggcagcgcgaaacaaaactaaccttacagccaacctgtctgtggccattatcttgtggatctcgctttttctcggcgacacgattctgcaactttttggtatatcaattgattcgttccgtatcgccgggggcatcctggtggtgacgatagcgatgtcgatgatcagcggcaagcttggcgaggataaacagaacaagcaagaaaaatcagaaaccgcggtacgtgaaagtattggtgtggtgccattggcgttgccgttgatggcggggccaggggcgatcagttctaccatcgtctggggtacgcgttatcacagcattagctatctgtttggtttctttgtggctattgcattgttcgctttatgttgttggggattgttccgcatggcaccgtggctggtacgggttttacgccagaccggcatcaacgtgattacgcgtattatggggctattgctgatggcattggggattgaatttatcgttactggtattaaggggattttccccggcctgcttaattaattcctttcaaatgaaacggagctgccatgctcccgtttacttcgtcattatttttactttgttcccgcgcagttatcaaaagcaaaaggaataggtaaaaatattcttctcaaattacagttagttataaggatttccttaactgcttctcctcatcatcatgttattttcgccacatcataatcctgggcttgctgaagaataattgaaatgatattagtaattccactgcctttggtagaggaaagtgctaaataanaatcaattgttaaattattgtgcatttcactactggaactgtaatcagaaaagatcgacatgcttaaccaatctctatttgattgaatttaaagatgtttgttaagacatggatgcaagctatagattctgatacggtcaataaaagagaattgcttaacaattttgcaaaatgtattggcgagtaagaaccgcatttggtactttccgggcaaccgtcaggcgattctttattggtaatgagaataattaacaattaaagagcgtcgcgaaagaataatgtgtctcgacaggggagacacagtacgaatcgacataagttgatcgtctgaatcaccagaataaataaagtcggtgatagcaatccgtaacgataaagtaacctgacagcagaaagtctccgagcctgtgcagggtcccaatccgggattacacatgctggttaataccagtaattataatgagggagtccaaaaaacaatgaccaacatcaccaagagaagtttagtagcagctggcgttctggctgctctaatggcagggaatgtcgcgctggcagctgatgtacccgcaggcgtcacactggcggaaaaacaaacgctggtacgtaacaatggttcagaagttcagtcattagatccgcacaaaattgaaggtgttccggagtctaatatcagccgagacctgtttgaaggcttactggtcagcgatcttgacggccatccggcacctggcgtcgctgaatcctgggataataaagacgcgaaagtctggaccttccatttgcgtaaagatgcgaaatggtctgatggcacgccagtcacagcacaagactttgtgtatagctggcaacgttctgttgatccgaacaccgcttctccgtatgccagttatctgcaatatgggcatatcgccggtattgatgaaattcttgaagggaaaaaaccgattaccgatctcggcgtgaaagctattgatgatcacacattagaagtcaccttaagtgaacccgttccgtacttctataaattacttgttcacccatcaanttcaccggtgccaaaagccgntatcgagaaattcggcgaaaaatggacccagcctggtaatatcgtcaccaacggtgcctataccttaaaagattgggtcgtaaacgaacgaatcgttcttgaacgcagcccaacntantggaacaacgcgaaaaccgttattaaccaggtaacctatttgcccattgcttctgaagttaccgatgtcaaccgctaccgtagtggtgaaatcgacatgacttataacaacatgccgatcgaattgttccagaagctgaaaaaagagatcccggacgaagttcacgttgatccatacctgtgcacttattattacgaaattaacaaccagaaaccgccattcaacgatgtgcgtgtgcgtaccgcactgaaactgggtatggaccgcgatatcattgttaataaagtgaaagcgcagggcgacatgcccgcctatggttacactccaccgtatactgatggcgcaaaattgactcagccggaatggtttggctggagccaggaaaaacgtnacgaagaagcgaaaaaactgctggctgaagcgggttataccgcagacaaaccgttgaccatcaacctgttgtataacacctccgatctgcataaaaagctggcgattgctgcctcttcattgtggaagaaaaacattggtgtaaacgtcaaactggttaaccaggagtggaaaacgttcctcgacacccgtcaccagggtacttttgatgtggcccgtgcaggctggtgtgctgactacaacgaaccaacttccttcctgaacaccatgctgtcgaacagctcgatgaataccgcgcattataagagcccggcctttgacagcattatggcggaaacgctgaaagtgactgacgaggcgcagcgcacagctctgtacactaaagcagaacaacagctggataaggattcggccattgttcctgtttattactacgtgaatgcgcgtctggtgaaaccgtgggttggtggttataccggcaaagatccgctggataatacctacacccggaatatgtacattgtgaagcactgatggcaatacgtggggcaggagtgtcctgctccacggtgtctgatttttatcgcattacagaaggcacaggccagaaggtagggcaatgttaaaatttattctacgtcgctgtctggaagcgattccgacgctatttattcttattactatttcgttctttatgatgcgcctcgcgccgggaagcccttttaccggcgaacgtactttaccgccggaagtaatggccaatatcgaagcgaaatatcatcttaatgatccgatcatgacacagtatttcagctacctgaaacaactggcgcatggcgatttcggtccatcgtttaaatataaagattattcggtcaatnacctggttgcatccagttttcccgtttctgccaaactgggagccgcagcatttttccttgcggtaatactgggtgttagtgctggcgttattgccgcattaaaacaaaacaccaaatgggactataccgtgatggggctggcaatgaccggggttgttatccccagttttgtggttgcgccattattagtcatgatatttgcgatcattttgcattggctgccgggcggtggctggaatggtggggcgcttaaattcatgatattgccgatggtggcgttgtcactcgcctatatcgccagtattgcgcgtattacccgtggctctatgattgaagtattacactccaactttattcgtactgcccgggcgaaagggttacctatgcggcggatcattttacgccacgcattaaaacctgctctgttacccgtgctctcctatatgggccccgcatttgtcggcattattaccggttctatggttatcgaaaccatttatggtttgccggggattgggcaactgttcgttaatggcgcattgaaccgtgactattccttagtgttaagcctgaccatcctggttggtgcgttaaccattttgtttaatgccattgtcgatgtgctatatgcggttatcgacccgaaaatccgttactgatactggagctcgcgatgatgttaagtaagaaaaacagcgagacgctggaaaatttcagtgaaaagctggaggtcgaagggcgcagcttgtggcaggacgcacgtcgacgnnnnntgcataaccgtgcggcggttgcaagtctgatagtgctggtgctgatcgcgttatttgtaatcctggcaccgatgctttcgcagtttgcctatgacgatactgactgggcgatgatgtccagcgccccggatatggagtccggtcactactttggtactgactcatccggtcgcgacntgcttgtgcgcgttgcgattggcggacgtatctcactcatggtcggtgttgctgcggcactggtggcagtggtcgtggggacactttatggttcgctttccggttatctgggcggtaaagtggattcggtaatgatgcgtttgctggaaatcctcaactccttcccattcatgttcttcgtcattttgctggtgacctttttcggtcaaaacatcctgctgattttcgtggcgataggcatggtttcctggctggatatggctcgtattgtgcgtgggcaaaccctgagtctgaagcgcaaagagtttattgaggcggcacaagttggcggtgtatcgacgtcgggcattgttattcgccacattgtgccgaacgtactcggtgtggtggtggtctacgcatcgctactggtgcccagcatgatcctctttgaatctttccttagcttcctggggttgggtacgcaagagccgttaagcagctggggggcattgctgagtgatggcgcgaactcaatggaagtctctccatggttactgttgttcccagcgggattcctcgtggtgacgctgttttgtttcaactttatcggcgatggcttgcgtgatgccctcgacccgaaagatcgttaaggagtgcagccatgagcgtaattgaaactgcaactgtgccgctcgcacaacaacaggctgacgcactgctgaacgtgaaagatttgcgtgtcacctttagtaccccggacggcgacgtcacggcggtcaatgatttaaatttttccctacgtgccggagaaacgctgggcattgtaggtgagtctggttcgggtaaatcgcaaactgcatttgcgttgatgggcctgttggctgccaacggacgcattggcggatcggcaaccttcaatgggcgtgaaatcctcaatttgccagagcgtgaactcaataaactgcgcgctgaacaaatctcaatgatttttcaggacccaatgacttcgttgaatccctatatgcgcgtcggtgagcagttgatggaagtgctgatgctgcataagaacatgagcaaagctgaggcgtttgaagagtcggtgcggatgctcgatgcggtaaaaatgccggaagcacgtaaacgcatgaaaatgtacccgcacgaattttctggcggcatgcgtcagcgagttatgattgcgatggcattgctatgtcgacctaagctgctgattgcggatgaacccactactgcgctggacgtcaccgtacaggcgcagatcatgacgctattgaatgaactgaagcgggaatttaataccgccatcattatgatcacccacgatcttggcgtggtggcggggatctgcgacaaagtgctggtaatgtacgccgggcgcacgatggaatatggcaacgcgcgcgatgtcttttatcaacccgttcatccttattctatcggtttgctcaacgcggtgcctcgtctcgatgcggaaggtgaaacaatgttgactattccgggtaatccgccaaacctgctgcgattaccgaaaggttgcccattccagccacgttgtccgcatgcgatggaaatttgtagtagcgcaccgccgctggaagagtttacgcctggccgtctgcgtgcttgctttaaaccggtggaggaactgttatgaatgctgtaaccgaaggaagaaaagtcctcctcgaaatcgccgatctgaaagtgcactttgaaatcaaagatggcaaacagtggttctggcaaccgccgaaaacgctcaaagccgtagatggtgtaactcttcgcctgtatgaaggggaaacattaggtgtggtaggggaatcgggatgcggtaagtccacctttgctcgcgccatcattggcctggttaaagcgaccgacggtcatgttgcctggttaggtaaagagttgctgggcatgaaacccgatgaatggcgtgccgttcgcagtgatattcagatgattttccaggatccgttggcatcgctaaacccgcgtatgaccatcggcgaggtcatcgctgaaccactgcgtacttatcatccgaaaatgtcacgccaggaagttcgcgagcgngtgaaggcgatgatgctgaaagtcgggttattgcctaacctgattaaccgctatccgcatgagttctctggtgggcagtgccagcgtatcgggattgcgcgtgctcttattcttgaaccgaagctgattatctgtgatgagccggtgtcggcgctggacgtgtcaattcaggcacaggtggtcaacctgctccagcaattgcaacgtgagatgggattgtcattaatttttatcgctcatgacctggccgtggtaaaacacatttccgatcgtgtgttggtgatgtatctcggccatgcggtagaactggggacctatgatgaggtctaccacaatccactacatccttacaccagggcattgatgtcggcagtccccatacctgatccggatctggagaagaacaaaaccatccagttactggaaggggaattaccgtcgccgatcaacccgccttccggttgtgttttccgtacccgttgcccgattgccggtccggagtgtgccaaaacacgtcctgtgctggaggggagtttcagacacgccgtttcttgcctgaaagtcgatccgctttaaacacaaaaagggctgacagctgtcagccctttttcacgccgaaagtgattatttattcccgccagatgatatggcaaagtttgtgatctttttcgcggcataacagaatgcgggcgaaaacatcgttgatttcaccatcttcactgtccgccagaccaatcacaacttcggcaaaaaagtctgggttcaaatcgaaatcaacatgttcctgccagtcttccgccggatcgaataactccgcgccgccgcgctcttcaaactgaagattgaacagcagaacatcagctggatcgagattgtcggcagccagttcgagaaaaatatcgtaggcctgctcaagcgtttcatcttcagtcaggcgattgtttagatccatatccatagtcactacctgtttaacctctgttggcgacgttttacagcaacgggctgaagaagtaaaacagtcgctcggcgacacgttgccataatggacgttttagccataaacgggcatcgagcagacgtgaacgcgaaatataatcgtcctgaacggcggcaaggtctgcaccaaaacctttatcgtcgattgccagggtaatctcgaaattcagccacagactacgcatatcaaggttaacggtgccaaccagacttagttcgccatcgaccagcacgctcttggtatgcagtaacccgccttcaaactgataaactttaaccccagcagcaagcagttccgtaaagaatgcgcgactggcccagccgaccagcatcgagtcattttttcgcggaaggataatactgacatccaccccgcgctgcgccgccgtgcaaatcgcatgaagtaaatcatcgcttggcacaaagtanggcgtggtcatgatcaaatattcacgcgccgaataagccgcagtcaataatgcctggtgaatgagatcttccggaaagccggggccagaagcaattgtgtgaatggtatgaccgctggcctgctcaaacggcataatattgacatcaggtggtggcggtagaatacgtttccctgtttcaatctcccagtcgcaggaataaataatccccatcgcggtggcgnnggggccttccatacgcgccatcagatcaatccattgccctacgcccgcatcttgtttgaagtagcgagggtcgaccatattcatgctgccggtgtacgcgatgtaattatcgatcatgatcatcttgcgatgttggcgcaggtccatacggcgtaaaaacacacgcatcagattgacctttaaggcttcgaccacttcaataccggcattacgcattagctcgggccacgggctgcggaaaaaagctacactcccggcggagtcgagcatcaatcggcaatgaatgccgcgtcgcgcagccgccattaatgattcagccacctggtccgccatgccgccgggctgccagatataaaacaccatctcaatattatggcgcgcgagctggatgtcgcggattaacgcctgcatcacatcatctgactcggtcatcagttgtagctgattccctttgaccccagcgatcccctgacgacgctcgcaaagcttgaataatggcgcagcgacactgctattttcttcggcaaagatatgcttacaggctttaaggtcgttaagccattttgcggtggaaggccacatcgctctggcgcgctcagcgcggcgtttgcctaaatggagctcgccaacggcaagataggcaataattccgactaacggcagaatgtaaataatcaacagccaggccatcgcngagggaactgcgcgtcgtttcattagaatgcgtaaagttacgcctgcaatgagcaaccagtatcccagaatggccaaccaactcaccaacgtataaacggttgtcatagattagaaatccttttgaaagcgcattgttatgagtttacgcatatggattcatctggcaaataaaaacgcgggaaaagcactggtcagcgtcgggggcgggggtataatgaccattctgttattgcatagagtagttaacatgaagcggagtagaacggaagtgggggcgctggcgcatgcagcgtcaggctagccgacgtaaatcgcgttggcttgaggggcagtcgcgccgaaatatgcgtatccacagcatcaggaagtgcattctaaacaaacagcgtaactcgttattgtttgcgatctacaatatctaaatgtactgggcaccattgcggtgcccaataagtttactcttccgtctttaaactctatttttgcgccgattctttactgtcagctttcgtttcttgttcatcgttatcgctgaaaataccatgacctgagttcaacaacattgaaacgagcatatcattattaatctcttcaccatttaaaactcgcgccagaatttcgctgccaaacagttgcggtgagagaatgatatccggatgtaccatcttaatcttattcaggtttttgctatcactgacggcgagaactgttttgacatcactgctcatatcttttgccgagagtacaacaaacgcgttatctgcatcgttatcactcagcgccagaatggcccggcaacgatcgattcccgctttctttaatacagaactgtcattactgtcaccggggataacatcagcgttatcgcctaagcgttgctcaagttgcttgatatcatcttcaggcaagttgctgataaccgttacgttttgtccgcgttgattcagttgcaggatcgtattaatggcgagaatcgaatgtccgcaaacaataaaatgatctttacgatgcattgtatgattgtttccttttacaagtttgttgaatcccccgcggataagcggaccaaaaattgaggtcatagatgtggcaaaaacggtaatgccggaaataatgaccgaaatagtgaacaatcgtgctgattcagaaacagggacaatatcgccatagccgacggttgacatggtttctatcgaaaaatagaacgcggtcatcaaactttctattcgcggattaaaaccttnnnnnnnnnnnagcgcaccgtaggttgagtaaaacagtaatgtcgtgaaactaataaatgcaaaaattgtcccggctgcggcgctactgtgggagaagtctttgcgcagtatcagtaaaaacaccagcgtaaaaatnnnnnnnccaatactaaatttcagccagggataaaaatgcagggtgtaaattagcgctatcaacaacaaaatgatactgattgcccatgcgagctttgcccggaacagtaagccaatggagttcaggacaagaaagacgccgagcataaatagtggggcgtttgccagcaaggagagatccaactctgaaaatgctttgatatggaaaatatcaagcaaattgaccgacataccatagattgttttaaaaataagcaacccatttaaaaagacggccagcgcgagaatgtcgtgccgtagggtcacccataaatttgttgctgtttgtttgaatgtagcccagtgactcactgatacctctgtaaccacaattttgtttaattatcttaacgtgcacattttctgaacatacatgcgacacgtgaatgtgttaaacaatagtagatgactttatccgcagtaatcaaaggttttgagtgagcaactctgcgtcaggaaagggcatttttcctgaacatgctcacatcatataaagaaatacagataaagttattatctgcttgtggtggtgaatgcaatgaccgacctataaggaaaggccaaacaagaacacggttgcaaaaaccgtgcccttaaatattggatctctactcagaacactttcttaaatggtttcactgaaacgtgttcatagactcctgccgctacgtacgggtcagcatcggcccaggcctgagctgcttccagcgattcaaattcagcaataacggttgagccagtaaatcccgcagcccctggatcgttactgtctaccgctggcattggaccagctgtcaacaaacgaccttcatcatgcagtaactgtaaacgtgctaaatgtgccggacgaacggaaaggcgtttttcgaggctatcagctttgtcttgagcgtaaataacatacaacacgggcacaactccttgttcgggaaagttgtaaagtacgttatttgaaagggcgaagatctgcaacggaaanatgatgtctttgttaagaccatgcataaagtaaggtcaattacgcnnnnnaatgacattttcactgatcctgatcgtcttgccttattgaatatgattgctatttgcatttaaaatcgagacctggtttttctactgaaatgattatgacttcaatgacccttgatttacctcgccgcttctcctggccgacgttactttcggtctgcattcatggtgctgttgtggcgggtctgctctttacctcggtacatcaggttattgaactacctgcgcctgcgcagccgatttctgtcacgatggttgcgcctgctgatctcgaaccgccacaagccgttcagccgccaccggagccggtggtagagccagaaccggaacctgagccgatccccgaaccgccaaaagaagcaccggtggtcattgaaaagccgaagccgaaacctaagccaaaaccgaagccggtgaaaaaggtacaggagcagcaaaaacgcgatgtcaaacccgtagagtcgcgtccggcatcaccgtttgaaaatacggcaccggcacgcccgacatcaagtacagcaacggctgcaaccagcaagccggttaccagtgtggcttcaggaccacgcgcattaagccgtaatcagccgcagtatccggcacgagcacaggcattgcgcattgaagggcaggttaaagttaaatttgacgtcacgccggatggtcgcgtggataacgtacaaatcntntcagccaagcctgcgaacatgtttgagcgtgaggtgaaaaatgcgatgcgcagatggcgttatgagccgggtaagccaggcagtgggattgtggtgaatatcctgtttaaaattaacggcaccaccgaaattcagtaagcagaaagtcaaaagcctccgaccggaggcttttgactattactcaacaggtaaggcgcgaggttttccttcaggatcaaccgcgacatacttaaataatgcttctgtcgctttatagcgttgcccgattggttcagacgctacttttttcacccacacttcaatattaatgctgaccgatgtcgtccctttctggacacagcgtgcatagcagcacaccacatcgccgaccgcaaccggccgtaagaaagtcattccttcaacccgcacagtcactacgcgaccgtgggcaatttcttttgccagaatagcgccgccaatatccatttgtgacattaaccaaccaccaaagatgtcaccattggcattggtatcggcgggcatggctaaagtacgtaaaacaagatcgccctgagggacgttatgtgttgtagacatggtaaaaccgacttaaaaggaaaatcacaggcgcgatgctactatgattttcctgaggagaacagaggagatacagcgccagccccaaaggactggcagtctggttaggatttatcttcctgcggcatgtggcggtagatatagataccgcttaacaatgtgaagattaaggtaagggcggtcaggccaaagactttaaagttgacccaaatattttgcggcagccagaatgcgatgtagatgtttgccagaccgcaaaggataaagaaaacagcccaggccagattcagcttcgaccataccggttgcggcagcgtgagttctttacccagcatccgctgaattagcggctttttcatcacccattggctgactaacagggctcccgcaaacagagcataaatgactgtaaccttccatttaataaactcatcattgtggaagaacagcgtcaagccaccgaagacgaccaccagaacaaaagtgatcagggccatcttctcaaccttacgaaagcgaacccagctatagataagcacaatcgccgtggcgacgatcagcgccgcagtagccgcatagatgtcataaattttgtaaaacgcgaaaaagacaaccagcggtaaaaaatcaagaaactgcttcattttacgattccgtaatcaaatgcttaaggttattggcgaatcaacatatacaggcggaacagatagatgagcaatatggctgaaatcaggttgctcaaggtgttcgccagtacggcaccaatttccggggttaatgcggcaaaagaagaggcaaaaagcagcaacagtgtttttgccagcaaccagctcagtactgcgggtgccaccagacgcatattcgcccaagtcagccgcatactgctacggatcgaggcaaaaacgcccattttgtcctgtaccagcatcaccggtgccagggccagtaatatggccatgataattcccggaacgaccaccagcatgatgccaatctgtactaaaagggtagtcagaaaaatcagaataaataactttggcaatatcggngcactggcaccaatagctcgcagcgcactgactctctgacccgcagacaccagctggataattaatattacgcctccggcgagaatggcgttaccgattaatcctgaaaaagtggacgccgctgaagcctgcagcaaaatttgttgctgttccggtgacatattctgaaccaggtcgaacaacccactactgccgctaacgggcacgccgtcattgagctgcgcaagctgtgcatcactgggtgagaaaacatgccctaacaccactgtgataaacgcacatagcaacgataccaacagaatggtcataaattgattacggaanaaatttccggtgtcacggtatacggactgcgccgtgatagacatgcactctccttgagttttatgcaggtgttaattagcgggcaattgtaccctggttaagcctcgggtggcagcatcaggtcttgtatggaaaagcatatctttgtaaagcggaggtaattgctggccttcaggcgtgggcaaaccgcggcaagtggcgaacgagttaatatttgcgtagcgaaaatnnnnnnnnnnnnnnnnaaatcacgttaaccaggattctcaatgcaacttctaaattaatccagatcaataaatggtgaattatcatatgtaatgtgatctatgtaggatcatttgttactccaatgtaggtatattcgtcacgtttttataaccataacgacggagcggatatgaaaaagttaacagtggcggctttggcagtaacaactcttctctctggcagtgcctttgcgcatgaagcaggcgaattttttatgcgtgcaggttctgcaaccgtacgtccaacagaaggtgctggtggtacgttaggaagtctggggggattcagcgtgaccaataacactcaactgggcctgacgtttacttatatggcgaccgacaacattggtgtggaattactggcagcgacgccgttccgccataaaatcggcacccgggcgaccggcgatattgcaaccgttcatcatctgccgccaacactgatggcgcagtggtattttggtgatgccagcagcaaatttcgtccttatgttggggcaggtattaactacaccaccttctttgataatggatttaacgatcatggcaaagaggcggggctttccgatctcagtctgaaagattcctggggagctgccgggcaggtgggggttgattatctgattaaccgtgactggttggttaacatgtcagtgtggtacatggatatcgataccacggctaagtataaatctggtgttactaccgtgaaagactcggtacgactggatccgtgggtgtttatgttctccgcaggatatcgtttttaattttctctgcaaaacctctgcaaaannnnnnnnnnnnnnnnnnnatcaaatgaccagttttttccattccttaccgcgtgcgtcgttgtaaatatcggtcattttttgattcgaatggcctagcaaaattttggtatcaaccccctgctctctgaacaatcgctctgataaagatctctgctcatggaaagagggtggggtgccattagcacgccagttgtaatccacagaatcccgggcttttttaaatgcaacggttaatgttgctggcttaaccatcccgccgcgcttagctgtccctttcgcgtgatggtggtgcaatagccacggactaagaacgcaatcgcggcaggatgacaccacatcatctagggtgagatttaatttatcgcaacgcagagccagagggatggcaatccgggttcctgttttttgctgttcgacatgacgataaccatcccggatatccgaaaattgcatnttgcaaatatctgaaaggcgctggcctgtcatcagtgccagcagcataccgcgctgtaaaaagtaaccatccttttccgctgcgttataaatcatcatccactcatcaaaagtcagtcgctgtcttgatatccgcacctgcggtttttttgcagattctgcagggttaaagcctggcgggacatcgcccgtttgctgagcttcccggaaaacatcgatcagtactttcctgaaaatttgtcccattctgttatgtcctctggccttgtactcttccagtactgataccacatcttttacggttatggcatctaacggtctggtgccaaaacgttcatcaaataccctgagaggggccgctttctgtttcagcgtgttgagtttgatctcgccgttttcatatctttcctgttgaatttttctgtaattattcagaaaaatggtaacggttgatgaaccgccggtatcactaataattttctcctgcagactgagcatttgttccatttgctgccgggcaagacggctgttcgcttctgctgcaatagtttctgccagtttctggtcaatactgccgagaccgtgatttttgcctgttatgggatgcctgtaacgccagtaaactttgttatttcttttgtcaaaatacggagataatcccggaacatcggttttatattttcnnnnnngcgccatcttccagtatcctcttcaaagcagggtgatctgtggcgatcacctccggcttgtttaccattccgacaaagcgagcttgcggatccactcgccagcgtcttccaacttttttggggagaggaaatatcattccggctttagcgtatttacttaacgtactcggagtagggaccggttcactgaattcctcttttgcccactcagtgagcagaataagtcttgccatgagcgtcgttcgctaatcatggtcgccgccactatagctggtgggcaacgaccggggttgaacattaaaaatcagcctgattcgggagcagtttttgccagataactgaaacgtattttgcctggtaacgggcatcatccagcgcattntggcgctcaccttcgaatgggatagcagttctggcatcgaagtctacggctttccccagctcaacgattgtgcgtacatcgcgatcgttgnagtancgccacgggcaggggataccctgtcgttcgtatgaacggcgcaaaatagtgttgtcgaagttggccccattaccccagacctgaacaaaaaactcaccggagttttcgtcgataaattcccgcaattgcagtagtgcatcatctaacgggatttcatcggtcataatggcagactgcgnnncncgtgattgcttcagccaccatttaannnnntcncgatcaatgacnccgccagcagtatccagatcgatggtcttnctaaattctggtcccatatctccggtttgcggatcgaaaaannnnnnncctanngagataatcggggcatcgggattttttcccatggtttcaaggtcgatcatcagatnnnnnnncgtnntgctggtggatgtgannnnnnnnnnnnnnnnnnnnnnnnnnnngggatctgmcgyctcgccagtttcactatcgnnnnnnngatgctgattgccgccagtgttctccttgtgtggatgttcagcgccttccatttcctccggatcattttcctgaacttnnnnnnnnnnnnnnnnnncgaatntttcctggtatgttgcgtcgcccatcaccgcgccacaatcagggcagttgccgccgccggtctgaccgcaggcggtgcagactttttccggttcctgttgcgcnactggttcaggctgtttcgtttctggctcgttttgnnnngcatttgggctgttytgttccgctttctggtcgttctgttccgtttcttgctggttctggttcacagaatcgcgggtttcaatncccttcacccatttcggatcattcgggtcgctaatccctgcaacaaattcaccacgtgatgcggcgagcaactgattggcgtcaggctggctgatattggctgcctgcataattttctttacttcgtcagcggtaacttttaccggttctggttgttcagaattttgtgcggtatttgcattttgcggtaagcctgtgtatgtgccattttttcgggcaaaatattcttcttttgtgatttcagtagccccggcagccagcgccttatccagaccagaaagtttgtttgcgcgaccgtatttttcgcaatccttgtcggtgaagaggaagtagaacggcccctcacgctctacagatggttcgacttccactttgcattcggttttttcgttgtccggaattgccgtttccactgcatcagtttctggtactggcgacgagagagtgtcagttgcgctctgatttgttccttcatcttcaaacacgccctttgtagtcaggtattcagtaatgtatttgttcagtgccacagggtctttgtgaatgtcgatcggacgttcacggacaaggccaaaaatagtctggcggtcgtagcgaagggcatcaggctgtttgcgcattgatgccgagatacgcttccagtcttcgcggtcgttgtcgataacttcattttttgcccagcgatggatgctgccgtcaatgtttccggcatccacatcaccaggccagagagcgtaggccagttcgtcatccagtgttttccatgtctgcttatattcgcgacgaatgactgcagtgacaggggggattttttctgctgagttttcagtgtgctgtcggtggactctggcgcgggcgagatcaacaacagacgtgtattttccggtttccttgcgttcaccttcgcgacgttttttccagatgcgcatttctgcctgaatttcgggccatttggcaccaggcttacatttatgcttaacccacccgatggcatgcagcttaagctccggatacatggcgttaacttctggcattttcatcaacgcttcaacgatatgtccgtcgaatgttgccatgtcttcctgcaacaattcctgcgcgctaatcaccatatcaacggtgatgttttcacatgtgtcgaacttaaccatgacagcgttctgtacttcaggggccagcttgtcaaaagcgacgttcatcggatctgattcagtctcaaccgggacaaaggaagcagccccctcatcccagcggttttcctgcatatattcagcatcccaggaatcgagggcagggcggggtataccgggtttatcctcgcaaacaagaaatttanaagcgcagtcctgagcagccggataatgctccaggaattgccagtgaaattttgcgcgggcgcgacgttcatcaccggcttcaatggcagtggctacagcgactgcaccttcttcctttattgcctgttcgtccggaatggcggcgcaaataaagactttactcattttgttttacctcattacagatttaagggtgaacaaatccctgccattgctggcatataagaatgaaatcggatgtttattacggaactgttttaaagacctgccgggatttcgttattatcctggtgaataactttatcgaccgggtaacagttaccgggaattttctgttcggttgctgcagtcacacactcctgcattgtcctgtgaacactgactgcaatatcaactggctctccggaaacaagaaaaactgtcagaacaagtgcaaatgctgtattcattgccagcatcctttttgtatcggacgtaaacgggccagcattgaaagaatgcatattttatttaataactcccgttcgtgttttctcttgttaatggcatcttcagtaaatacagggttactgatagtgacaccaatttcaaaacaaccttcagacgtattaacgtttggtaataacgtttccattatcgcgtcctcaacaatgaattttgtgatgcggtgcctggtgcctccaggtgacgttaaccagttaacaattaacgccggatacagtgaatccccccataacactgttttnnnntttaactgttccgcgtgcgcttagccgcattcactgcatcacaaaattcactttaaaaagggcggacatcagttcatgggcaaacagatgccgccaaaygtcaccagaaaattgataacagagggcgttgnagcggggttgtcacttaagcgtatggtcaacctgacaacccggtgtcctcaacggggaaggaataaccccgccatacttaccgctgcgccatttcgcgttatgctctgacttttcagagaaatatcctttcagtaaactgtcagtgccggatgttcacccgtgtccggcgcacgcactccacttcacccgtggagaactccttaattaccaaccctcaggagggtgaatgttaaaatcaactcttattgctaaatgcctttatcaaaatcgcatggtaagcagcatttcaataggcgagtctgcagttaaaagtattttcgaagagtactttcccgggcatgattttaataaatggaataccaaattaccgccagcagtttcaacgcgtattctgaaagcaaccgaaagagcaagtacaattcgcgttaactatttcattaaagatttgtgggatctttgatatccacagagcctaaagtatgtgcatatggatgtgctattatgcgccctcgcagatttgcatcattttctaaattcactgaacgaaacagggcatcaacaaggctctgtacaatgcaaaggcaatcgaagactgtcgccgtttctgttttgattgatgaaagaacatggccattcacgcaaacagaaattacccgtttattaacatcgctttcctgcttttgattatcagaaccatatagcccagaaaaagcattgcgcacattacgaaccatattatcgatggtttctttttctgcggtactaaggtcaagagtagccagttgtgaacgaactatattcgatgccatttcctgtaatggcgttggtaaatctttaaattccattattagcctcgttggttagctattaacgtgggtatgtaatcattctggcaatgcttaatgccgctgctttttccagattggtgatatcctgctccagagcggacagattttcagcctgcttagccctggcttcattggcccatttcaggtcctgcaccgccttaattttctggtgcatccactcataaagttcatcatcggtatagtctggcgcgatgatgacggggtctcgtttctgcatgtcggctccttgtggttagcgttgcctgctttttaaccacgtcaggcgaggtggtatcctctgaggggtctgttactcgagaggaaattggttatgaatacaatcaagttttcttgcccagaatgtggtggctaagtctttgacacatcctttaagccgcagggctctgacagtttcgcgggagccatctgcaaaaattgtggtcaccttgtaactgaagatgagtcctcgcagttcgatgacgaaatcgttgacaatatcttcggtgcactcaccagagactttctgaagtaaaggcgcataccgcttagttaccgctctgataactcttacctgtccggcaatggcgctgatatcaatatananngnnatcgctgtttctttgctgatccctggacgccttccattctgatgtttgactcgcccactgagaaatcctctgcttccccttaacgccgggtagcggaactgtttgctgagaacaccgtgcggtgtcttgatgagtagaatttagaatagcctaagagttatggtcaagctttttgtgtagaaaaacctaagcttcttgatgtaaaaaacacaagtatttgaaagtttgtgctttttattacagagagttgcgaaaaaaaggggggttatttatttgcgcttcttttgcgagctttgagtagttcttcaaaaagtttgttgaaattctcaactcgagcacgcatctctgacaacagagccttttgctctgactcaggcagtgcgtcgaacagttgaagcaactctttttgatcttctgtcagattgactggctgattatctgggatcggttcgcctggttgcttatcttcatctccaaaaagaagccaagtcggcgagcactgaagcgcctggctcagtgcgaataatctcttccccgctggctgtgtttcatctctttcccattgagaaattgttacgtgagccactttgaccagcttacctaatgcggcctgagacagttttaatttttttcgcctgtataagaggcgagcaccgaaggtttcgtttttcatattaggtaattctaatttttcttgacttaggtttctctacgatctagtttccttaggaaaatctaaggggttcgatatgttgaaaattgatgctatagcgttttttggcagcaaaacaaagcttgccaatgtcgcaggagttaggctggcaagcgttgctgcatggggggaactggttcctgaaggtcgcgcgatgcgcctgcaagaggcatccggcggggaacttcagtacgaccccaaagtttatgacgaatatcgtaaggcaaagcgggcggggcggttgaacaatgaaaatcaccactgaacaggtttgtgaggctctggatacctgggtatgccgaccaggaatgacacaggagcaggcgacgatattaatcacngaagcattctgggctctgaaagaacgcccgaacatcgatgttcaacgcgtcacgtttaatgatggcgaggttgatcaacgggcgctgggcgttaaccgggtgaagatattcgaacgctggaaagctatcgacaccagagataagcgtgacaaattcacggcgctgattccggcaattatggaggctatccggatcagcgatttcagattgtattgtgaaattactgacggaaaaagcattacgtacatgatcgccgggttaaacaaagaatatggcgatgtggtggagtccgggctgctttttgcggatccagttgttgtggaacgtgagactgacgagcttatagaaaaagctattgctttcaagcacgcgtatcgtcagcaataccaatattactttgcagataaacaaatgtctgccagggnnnnntatgagtatcgatgcactacgatgggctaaaaaggtgaaaaccggcagttcatccagtaagtcagtattgacctggcttgctgatatgtgcggtgccgatttgtgtgcatacccgtctgtatctgcactggcagaagtaacggaactgaacaaaaagactgtgcaggacagcttacgacacctgatggagattgggttaattgttgataccggtgagagaaaaggcagaacaaagcaaattgtggtgtaccgacttatcggtgtagaagaaagtgttgccgagcctgaatacacccaaaaacgggagtctttaaaggtgggtaaaattggtgctgttaataaaaacagtaccgaaaatggttatgtttcagcacaaaacagacccaaaaacagaactcttagctgcatggaaaataaccaaagacacccaaattttccatcaaagacacccaaaaacggatcacggaacccaaaggaacccaaagatctaaaccccacacataacgcacgcgagagtgctccgaccagtgagcaggaagttttgtcgttacaggcagccccccctgtattcctgtatggcctgagcgaacccatcggaaaattcccgatgagcgatagctggtatccgtcacgggattttcgacgacgggctgcgttgtgggggatggctttgccggagacagaatttacacctgctgaacttgccgccttccgggactactgggcagcggaggggaaagtgtttacgcagattcagtgggagcagaaattcgcccgtcacgtaaatcacgtcagggngcaggttaaaccagtcagcaaaggggtaaaccatgcagcagcaccaggtggcaccgcatcacgggcagttcaggaaattcgggcagcacgtgagcagtgggaacgtgaaaacggatttatcagcgacggaaacggcctggaagctgtgggaactcatgggggtggtttattcgaaccgctggatccagaagaacggggccgcaccttcgaagctctggattgcacagattggcgcgatgactgagcagcaaatccggcaggtctgccgccagtgcatggaccgctgccgggcgggtgaaacatggcctccggacctggctgagtttgtggcactgatttcgaaaagcggagccaatccattcggtctgacggtggatgctgtgatggaggagtaccgccgctggcgcaatgagtcctggcgatacgacggaagtgataagtacccgtggtctcagtctgtgctgtatcacatttgcctcgagatgcgttcaaaggggattgagcgccagatgaccgaaggggaattaaaacggcttgcagaacggcaactgacgaaatgggcaaagcatgttagtaacggcctgagcgttccgccagtccggcgacaactggcgncccccaaacgcccgtcggggccaacgccaattgagttgctgaaacaggaatatgaacgccggaaagcggctggttttgtttgagttgagaagtgattttttaccgggaggaaatttatggagactgtttttgacgcactgaaagcgatgggaaaagccacgtcggtagagctggctgcgcgacttgatatcagtcgtgaagaagtactgaacgagctgtgggaactgaaaaaggctggcttcgttgataaaagcgtatacacctggcgtgtggctgataacaacgttcagcaggaacagccagcgccagaagaaaccaccacggcaacagaagcgaaaatctcagagtgcgatttaaccgcgacgattgaacaacgcggaccacaaacggcggatgaactggctacgctgttcggtacaacatcccgcaaagttgcttcaacgctggcaatggcaatcagcaaaggtcgtctgattcgcgtaaaccagaacggtaaaattcgttactgcataccaggtgataatttaccagcagagccgaaagttgaatcggtagcggaaaccgatggtaaagcctttcctcagccagccggtgttgcgttaccggtacagaaagatgcaacacaggaagatattaaaacagaaactgtggcggacattgtgcagtcgctgccatcgtttactgcaacgcgagaagatgatttgattttgccatcgctgcatatggcaaatcgcgaactgcgtagggcgaagaatcatgtccagaagtgggagcgagtctgcgccgcgctgcgggagctgaacaagcaccgggatatggttgccgggatttgtcggaagtccgggcaatgagcggatggtgcaggcctgaaatcatgatactaacaatgaaggtaaaatgcatcggcagtctgattggtcgtagtgaggcggcggtcaggatgaaagcccaggttaagggaataagcctgattctgcggggtgattttcaccagtcaacaaaatatccgtagcgcgataacggtcaaaaattatggcgctgacacttttgtgccactggagatgactgtacctaagttcaggggagaagaacacgtccggtgggatggtcgggccanatttaaagggcaggtcatggctccagcctgtacgctggcaatggangctgcctggcgggaaattgatatgggaaccacgccactcagggatttactgccggtccagagaataaattcctgttacggttacaccactgtgatcttgcaagtgcaggaaagtaggtctacacggtaacgcgagtgcgtgtaacttttgatgtcattcccgtagaaacaccggacaaattttcgctgacaggtcatgcagaaggtataaatctgcagattatggacaattacggatatccggcaagagccggaaaaagcatgccgcctctaattctcagtggaagatggacttgattatactcattgcattgtcagaaatagttatccattaaaggctggctattccaaacaggatgttgattacaaaaatgtaatcaacatgtaaggtttatactcttcaatatgcgtataattttccttattttgttgactttaaataacaagctatgcacgaggtaaagtcngataagtttatctggatgtaatatntattatttgtagtgtttataactttatttcatgataaccaataaaaggagttttttatgaggaacataatggcaggttttttaatattcctgtcttctgctgcttatgctgatatcaatctgtatggtcctggtggcccgcatacagccttgcttgatgcagccaaactttatgccgaaaaaacaggtattatagtgaacgttcattacggcccacagaacaaatggaatgaagatgccaaaaaaaatgcagatatcttgtttggcgcatcagaacaatctgctctggctatcattcgggaccataaagacagcttcagtgaaaaagatattcagcctctttatctgcgaaaaagtattttactggtaaagaaaggtaatcctaaaaatatccggagtattgacgacctgaccagacctgggattggcgtaattgttaatgatggtggtggtaccagtaatacatcaggcactggcgtctgggaagatattgccggacgtaaagggaatatagaaactgtcgccgcaatccgaaaaaatattattttatatgcgcccaatagcggaactgcacgtaaggctcttgagaatcagcctggagcagatgtctggataacctgggctgactgggcagccagtaatccagaaattggtgatgtcgtggaaatagcgccagactacgtgatatggcgtgatatgaacattacagtacgtcaggatgcaaatgatgaaacccgtcgatttgcagaatggctacaaaccgatgaagcggcgcctgcnntcannaaatatggctggaccaggaaaggcacttgacatcctcgtccttcaggacgtggattctttttccggatgccgcgccagcggcatgtaggggcagctcacaaaacggaaaaaattgtacgctaagcctcgccaggtgaactgaattcattccgatatgggaattcccatatcgggcgaaaacggtttgctgtaacggcagagttaagtaggattgctgcgggtgcttgaggctatctgcctcgggcatgaacaccaacggcagatagataaaagccccacccgactataaatcgaagtgaggcccctatatgctcgtcacatatagattgcctcttacggaccgaaaggtcaaggagaagcaggctatgaagcagcaaaaggcgatgttaatcgccctgatcgtcatctgtttaaccgtcatagtgacggcactggtaacgaggaaagacctctgcgaggtacgaatccgaaccggccagacggaggtcgctgtcttcacagcttacgaacctgaggagtaagagaccaggcgggggagaaatccctcgccacctctgatgtgtcaggcatcctcaacgcacccgcacttaacccgcttcggcgggtttttgtttttattttcaacgcgtttgaagttccggacggngccggaatagaatcaaaaatacttaagtagcgcgcagggagaagagggatggaccccgaacagggggagtgctatttatctggaaggattctgttgatgaaaatcgaagaattacgtgaaatttttagtgaagatggcctctatactgtgcgcgttgagaatggcgctattgtcagccactgccgtattaaatgtttacagtctctacataggaagagtggagctgcgttaatttnctttgtggatgggcttgtgacggatggttttattttgcgtgcaaatgaatttgtcacatcgttgccgtctctgaaagaagctgggattaaggctggtttttctgcttttgaagattagtgaattcatctacaattcagcgcagggctgaacccctgttgagtaacactgtgccaccggagaaagccgatggcgcaaaattccagactacacaattctgataattcagccgtctttgccagcaggcacgggcggcgttctcatgcattcaaatctgactggttccggcacgccccatgcactgaagaacaggccgaatggctgattcagaactaccgcagacgtgggtatgagtttaggaaagccctcagcctcgattatcgtcactggataatctacgtcaggctgccgtactccgagcgcccaccgcgtccgtcccgcacattccagcaacgcatctggaggtaacgtgcgggtattacttcgacctgttccggtaccggaacttgggttggtggtccttaaaccaggccgtgaatcnnnnncaggtattccataaccctcgagtgcttgtggagccggaaccgaaaagcatgcgcggtctgccgtccggcatcgtccctgccgttcgccagccgctggnggaggataaatcattactgccgtttttcagcaatgagcgtgtgattcgtgctgttggtggcgctggtgcactgtctgactggctgttgcgtcatgtcaaatcctgccagtggcctcatggtgactatcatcacagtgaaaccgttattcaccgttatggtaccggcgcaatggtgttgtgctggcactgcgacaaccagctgcgtgaccagacatccgaatcactcgagcaacttgctcatcaaaacctgtcagcatggatgattgacgtcatcggtcacgcaataagcggtacgcaggagcgtgaattatctctggctgaattatcctggtgggcggtccgcaatcaggtggcggacgcgctaccggaagcggtattacgtcgttcgctggggttgcgtgcggaaaaaatccgctcaatgtaccgtgaaagcgacatcgtaccgggagagcagaccgccaccatcatactgaagcagcgcacaaaaaatcttgcgccgctgcctcacgcccaccagcaaaacccnccacaggaaaagacggtggtcagcattgccgttgatnnnnnnnnnnnnnnnnnnnnnnnnnnnnnnnnnnnnnnnnnnnnnnnnnnnnnnnnnnnnnnnnnnnnnnnnnnnnnnnnnnnnnnnnnnnnnnnnnnnnnnnnnnnnnnnnnnnnnnnnnnnnnnnnnnnnnnnnnnnnnnnnnnnnnnnnnnnnnnnnnnnnnnnnnnnnnnnnnnnnnnnnnnnnnnnnnnnnnnnnnnnnnnnnnnnnnnnnnnnnnnnnnnnnnnnnnnnnnctgtccggaaggctnnnnntaaagattattgcagagccaccggataagcgncgtcgtgacctggacaatatcctgaaagcaccactggatgtgctgacgcatnnnnnnnnnnnnnnnnnnnnnnnnnnnnnnnnnnnnnnnnnnnnnnnnnnnnnnnnnnnnnnnnnnnnnnnnnnnnnnnnnnnnnnnnnnnnnnnnnnnnnnnnnnnnnnnnnnnnnnnnnnnnnnnnnnnnnnnnnnnnnnnnnnnnnnnnnnnnnnnnnnnnnnnnnnnnnnnnnnnnnnnnnnnnnnnnnnnnnnnnnnnnnnnnnnnnnnnnnnnnnnnnnnnnnnnnnnnnnnnnnnnnacaagagttattggtgtgtcacgttaaccnnnnnnnnnnnnnnnnnnnnnnnnnnnnnnnnnnnnnnnnnnnnnnnnngcaggatatgacngaaaccgccagagttgtgtttnatgannnnnnnnnnnnnnnnnnnnnnnnnnnnnnnnnnnnnnnnnnncctttcacgcnnacgctgccagttaatactgacccnnnnnnnnnnnnnnnnnnnnnnnnnnnnnnnnnnnnnnnnnnnnacagacgccttcagtcctganngcttttttattnnnnnnnnnnnnnnnnnnnnnnnnnnnnnnnnnnnnnnnnnnnnnnnntcnngcgttggggtcacaagcaaacctcaggccnnnnnnnnnnnnnnnnnnnnnnnnnnnnnnnnnnnnnnnnnnnnnnnnnnnaatatccagttgtgagttaatcaacgnnnnnnnnnnnnnnnnnnnnnnnnnnnnnnnnnnnnnnnnnnnnnnnnnnnnnnnnnnnnnnnnnnnnnnnnnnnnnnnnnnnnnnnnnnnnnnnnnnnnnnnnnnnnnnnnnnnnnnnnnnnnnnnnnnnnnnnnnnnnnnnnnnnnnnnnnnnaagcctnncggnngtcnntacctgttctgtggtcatcgnctggcannnnnnnnnnnnnnnnnnnnnnnnnnnnnnnnnnnnnnnnnnnnnnnnnnnnnnnnnnnnnnnnnnnnnnnnnnntccggacgctggaacgggtgcaacaaggaannnnnnnnnnnnnnnnnnnnnnnnnnnnnnnnnnnnnnnnnnnnnnnnnnnnnnnnnnnnnnnnnnnnnnnnnnnnnnnnnnnnnnnnnnnnnnnnnnnnnnnnnnnnnnnnnccgggtggcannagagnnnnatcnnnnnngngaactggannagccacaccnnnnnnnnnnnnnnnnnnnnnnnnnnnnnnnnnnnnnnnnnnnngtatttcggtgtgacggtgcaggtgccgtacaccgatgtgtggacgtataaaccggtgcagtactatccagggaaacatccgtgcgaaaaaccggcagaaatgctgcagcagataatcagcgcaagnagtcgtccnggnganctggttgcggattttttcatgggnnnnnnnnnnnnnnnnnnnnnnnnnnnnnnnnnnnnnnnnnnnnagcgagcgactcataatcgccaggtcgctggttcaaatccagcaagggccaccaaccgccactnnnnnnnnnnnnnnnnnnnnnnnnnnnnnnnnnnnnnnnnnnnnnnnnnnnnnnnnnnnnnnnnngtccattatcngtatnctgcgttgttagctcagccggacagagcaattgccttctaagcaatcggtcactggttcgactccannnnnacgcgccacaccacacttatctgccctgactctcttttgcgggctttttattacaggaaagacaccggacagtgaaatgttaaatgcctcacaattcaggtagttgactgttgcctgacatgctgagcgtttgttaaaaaaatcctgcatnnnnnnnnnnnnnnnnnnnnngggcanaatgacagatgtttggttgcgtattgtataggcaagttgcggattctgtctggtcattgcagaattcaccgggaggcacccggnnnnnnnntgtatacagagattaggcatatatccaggctcctcatcgcaggnnnnnnnnnnnnnnnnnnnnnnnnnnnnnnnnnnnnnnnnnnnnnnnnnnnnnngnntcgggcaacagcatgagatacttgcattgtcatttttanngnnnnnnttttaaccagggtntataaggctnngcaacnnnnnnnnnnnnnnnnnnnnnnnnnnnnnnnnnnnnnnnnnnnnnnnnnnnnnnnnnnnnnnnnnnnnnnnnnnnnnnnnnnnnnnnnnnnnnnnnnnnnnnnnnnnnnnnnnnnnnnnnnnnnnnnnnnnnnnnnnnnnnnnnnnnnnnnnnnnnnnnnnnnnnnnnnnnnnnnnnnnnnnnnnnnnnnnnnnnnnnnnnnnnnnnnnnnnnnnnnnnnnnnnnnnnnnnnnnnnnnnnnnnnnnnnnnnnnggccgnnnagtccaatgccatgncttacggtgaagggcttccgctgccggattnnnnnnnnnnnnnnnnnnnnnnnnnnnnnnnnnnnnnnnnnnnnnnnnnnnnnnngcatgatgtgcaggatatgagtacgctgaatcatccgaaggcagacctgagcaaagggnnnnnnnnnnnnnnnnnnnnnnnnnnnnnnnnnnnnnnnnnnnnnnnnnnnnnnnnnnnnnnnnnnnnnnnnnnnnnnnnnnnnnnnnnnnnnnnnnnnnnnnnnnnnnnnnnnnnnnggtgtgggnnaaccgttatatnnnnnnnnnnnnnnnnnnnnnnnnnnnnnnnnnnnnnnnnnnnnnnnnnnnnnnnnnnnnnnnnnnnnnnnnnnnnnnnnnnnnnnnnnnnnnnnnnnnnnnnnnnnnnnnnnnnnnnnnnnnntctccgtgtttaacgcgcagtgccatggnnnnnnnnnnnnagatgtgccgtggntttgtggtgacacgacgtattactggaaaaatnnnnnnnnnnnnnnnnnnnnnnnnnnnnnnnnnnnnnnnnnnnnnnnnnnnnnnnnnnnngtnnccttcatgacagacggtaacggcgtcaataccgnnnnnnnnnnnnnnnnnnnnnnnnnnnnnnnnnnnnnnnnnnnnaggatattacggtgcggcatcgagaacnnnnnnnnnnnnnnnnnnnnnnnnnnnnnnnnnnnnnnnnnnnngcacctcagccttcatnngtggtaaggcaccggaaatcaaaccctcgcccggcggcaacacgccannnngtccgtctgcagatacgtccgttcgcacaatctccnnnnnnnnnnnnnnnnnnnnnnnnnnnnnnnnnnnnnnnnnnnnnggtggatgacgcaattaccctgctgacacagggcggcagactgacctgtaagttccgcctgtnnnnnnnnnnnnnnnnnnnnnnnnnnnnnnnnnnnnnnggtactggtaatccgttcctgatgtcgtacttnacnnnnnnnnnnnnnnnnnnnnnnnnnnnnnnnnnnnnnnnnnnnnnnnnnnnnnnnnnnnnnnnnnnnnnnnnnnnnnnnnnnnnnnnnnnnnnnnnnnnnnnnnnnnnnnnnnnnnnnnnnnnnnnnnnnnnnnnnnnnnnnnnnnnnnnnnnnnnnnnnnnnnnnnnnnnnnnnnnnnnnnnnnnnnnnnnnnnnnnnnnnnnnnnnnnnnnnnnnnnnnnnnnnnnnnnnnnnnnnnnnnnnnnnnnnnnnnnnnnnnnnnnnnnnnnnnnnnnnnnnnnnnnnnnnnnnnnnnnnnnnnntatgcggattgtttcagttacagatgctttatnnnngnnnnnnnnnnnnnnnnnnnnnnnnnnnnnnnnnnnnnnnnnnnnnnnnnnnnnnnnnnnnctggctcagaaggatagttggatttcacatgatacttatgcctnnnnnnnnnnnnnnngacagacagtgacggntgttgtcnnnnnnnnnngtcatttataacctgaatnngggnntggncggaatgttatctggcattnnnnnnagagcctgaatgccataatcacgnnnnnnnnnnnnnnnnnnnnnnnnnnnnnactggcggnttttttgttttnctnnnnnnnnnnnnnnnnnnnnnngtgacggagacatacatcagatgnnnnnnnncacaacaggtgtgtcatacaccacgtnnnnnnnnnnnacgggatactggttactgcagctnnnnnnnnnnnnnnnnnnnnnnnnnnnnnnnnnnnnnnnnnnnnnnnnnnntctgctgtttggcctgctgacgtanctgacgaacctgtatttcannnnnnnnnnnnnnnnnnnnnnnnnnnnnnnnnnnnnnnnnnnnnnnnnnnnnnnnnnnnnnnnnnnnnnnnnnnnnnnnnnnnnnnnnnnnnnnnnnnnnnnnnnnnnnnnnnnnnnnnnnnnnnnnnnnnnnnnnnnnnnnnnnnnnnnnnnnnnnnnnnnnnnnncgaccagtttctggatgaaaaggnnnnnnnnnnnnnnnnnnnnnnnnnnnnnnnnnnnnnnnnnnnnnnnnnnnnnnnnnnnnnnnnnnnnnnnnnnnnnnnnnnnnnnnnnnnnnnnnnnnnnnnnnnnnnnnnnnnnnnnnnnnnnnnnnnnnnnnnnnnnnnnnnnnnnnnnnnnnnnnnnnnnnngtggtgatactggatgcggataaaaagcagatacagtgcgtggtaagaccgctgcaaatcctgcgtgctgacgggacgtgggaaaatnnnnnnnnnnnnnnnnnnnnnnnnnnnnnnnnnnnnnnnnnnnnnnnnttgnngtcatgtatgggggctgtttgttatgactccctgtgtttggaatgaatatttaaatagggagttttgtcatgcnnnnnnncatcagctattgcatccaattcattttccaccggaatgcaggttcttcgtgctcaaatggccgccagtggcggtggagaaattacagtaggcgggcagacggtccgtatcacatatagtgaaacggatggtcgctttctggcgagtgggggcaataacagtttgctttctggattattacttacagggcttaatggtggtcctgaagcgctcagggatataatgttaagaatggtttcaggttcaggtaacacacaatcacatggtgatattgaggggaaaatatcacaatgtaagttttctgttaatacggagagccttcagtgtccatccgaggcggttcgatgcccaattatactggataaaccagaagaaggtgtgtttgttaaaaattcagaaggttctttggtttgtaccttatttgattcggtttctttttctcatttggttcgcgacggtgggaagcacccgctaacacgagaaccaataacgtcatcaatgattgtaagtcaagaacaatgtatttatgaccaaaccaaaggaaactttgtcataaaggataagtgaaataaatattacccaagctatatgttaactgccagttgcttatatgaaatgctacagatgttcagggtataaggatgtggtaattggtgtactggatgcagctaaaaagcatatacagtgngtggtgaggccgctgcaaatctggcgtgctgacggggaaatattggcgggatgaaatagccgacggattcacaaaaaccggagtcnggctccggtttttgttgtcatgtcagggagatgtttgttatgaagcccagaggaaatatttatcngtatgaaggaatatggtaatgcctggattagtatcatatatatcatcgacttnnnnngcgaatgagatggcggagatgcgtcagcaggtaatggangggcagattggtggatttctcctgggaggggagagngttagagtttcttatttatttcaattgcattaatatcttgaatggattacatagagttaatgtatccagtactccctattctcttgcatataatacatgttgcaacttacatctcagcgctatgaaaaaacaccacctctctctttatgaaattctggatttaccaagcgctaatttatcatttcaatctacctttaagtattgcatttatctccctacgaggtcatactttaggaagttaaatatgaatgataatatacctacagcgcgaaatcacaaacaatcgnnntgtattacagaaaaaacatgcctatatttttaaacttcacagcaggaagtatcttnnnnnnnnnnnnnnnagcatctttacgttatattgtgcannnnnnnnnnnnnnnnnnnnnnnnnnnnnnnnnnnnnnnnnnnnnggatatccgttatatcgaatcagtcaatggttttacagtaaatcctgtatgcagtaatcatttctccatatnnnnnnnnnnnnnnnncactattgctcgcaacctggaacagcagatcaacaacggacgaagttttgcacaaatatctcaggatttnnnnnnnnnnnnnnnnnnnnnnnnnnnnnnnnnnnnnnnnnnnnnnnnnnnnnnnnnnnnnnnnnnnnnnnnnnnnnnnnnnnnnnnnnnnnnnnnnnnnnnnnnnnnnnnnnnnnnnnnnnnnnnnnnnnnnnnnnnnnnnnnnnnnnnnnnnnnnnnnnnnnnnnnnnnnnnnnnnnnnnnnnnnnnnnnnnnnnctcnntatgataagtctgcgttnnngaatctcacaagagaacatctaccccaccctctnngcagggaaaagatagtaaaagaaatgattattgaaaggnnnnnnnnnnnntttgacacnntnnnncannanntnnnnnnnnnnnnnnnnnnnnnnnnnnnnnnngnnttnnaaataaaanntaataattacatactattagtgattctcannnnnnnnnnncggnncgccagaaccgtattgatatttactgaggagcctgtacatagatnngtgtnattgcctgattttgatatgttcaatccaacatcaaaagcaggttaatttatggacgaaaaacagttgcaggctctggctaacgaactggccaaaaatntcaaaacccctgaagatctcagccagttcgatcgcctgctgaagaaaatcagcgttgaggnngctnncaacgctgaaatgtcccaccatctgggctacgataaaaaccagcctaaaccgggtgccaactcccgcaatggcnnttcnncaaagaccgttatnncnngtgatggccacctggaactacgcactccgcgnnatnntgatggctcttttgaaccgcaacttgtgaagaaaaaccagacccggatcaccgggatggataaccagatcctgtcgttgtacgccaaaggcnngnnaacccgcgaaatagcggctgcgtttaaagagctgtatgacgctgatgtctcaccggcgctggtatcgaaggtcaccgatgccgttatggagcaggtagtcgaatggcaaaaccggccactggatgcggtctatcccattgtttatcttgactgtattgtcctgaaggttcggcaggacagtcgcgtaatcaataaatccgtattcctcgcactgggtatcaatatcgaaggccagaaagagttactgggtatgtggctggccgaaaacgagggagcgaagttctggctcaatgtgctgactgaactaaaaaaccgcggcctgaacgatattctcatagcctgtgtcgacgggctgaaaggcttcccggacgctatcaacacggtgtatccggaagcccgcatccagctgtgcatcgtgcatatggtgcgcaacagcctgcggttcgtttcctggaaggactacaaagccgtcacccgcgacctgaaagccatctaccaggcccccacagaagaannnngccagcaggcgctggaagcgttcgccagcgcctgggacagtcgctacccgnnnntannccggagctggcaggcaaactggaccaacctggcgatgttcttcgcttacccggcagatatccgcaaagtcatctacacaaccaacgccatcgagtcgctgaacagcgtaatccggcatgccatcaaaaaacgcaaggtgttcccgacggatgactcagtgaaaaaggtcgtgtggctggcaatccaggcggcttcacagaaatggacgatgccactgcgggactggcgtatggcaannnnccgctttattatcgagttcggtgaccgcctggacggtcacttctgagaaaaggcatttacacagaatcgtgtacagggtcgattttactcgttaattagcgaacaaaccactcgtcagcagactcccaggtatctttcagcgtctcctgaacaaaagtttttnnagaatctttatcggcggtgcgagtaactgaaaggccatcgttgctggtggatttgatgatcacttctacatcgtcataacgtttactgacacgtcgcagcatttcttgttgcagggcaggaacagaaccttttggcattttgttgattttggctgcggggtatctgtggggcatatatgggacataaaaagnnnncaaataaacagcaaaatcgagattagggatnnttannnnnnnnnnnnnnnnnnnnnnnnnnnnnnnnnnnnnnnnnnnnnnnnnnnnnnnnnnnnnnnnnnnnnnnnnnatcagtctgagcttgaccagagtnnnnnncggtggatctgtgaaaacacgggcatgtggacccnnganngtnnnnnnnnnnnnnnnnnnnnnnnnnnnnnnnnnnnnnnnnnnnnnnnnnnnnnnnnnnnnnnnnnnnnnnnnnnnnnnnnnnnnnnnnnnnnnnnnnnnnnnnnnnnnnnnnnnnnnnnnnnnnnnnnnnnnnnnnnnnnnnnnnnnnnnnnnntgaacaccacgctgggcgagaccnnnnnnnnnnncgtgggcgaaaaactcgatcaccaggtactgnnnnnnnnnnnnnnnnnnnnnnnnnnnnnnnnnnnnnnnnnnnnngtttatctgacggcgggcattnnnnnnnnnnnaaanngttttgagatgtatgtctnnngatgggctccgggagaggaagcctttctggtggataaaatcannnnnnnnnnnnnnnnnnnnnnnnaagagacgctgttacgtgtggatgcnnnnnnnnnnnnnnnnnnnnnnnnnnnnnnnnnnnnnnnnnnnnnnnnnnnnnnnnnnnnnnnnnnnnnnnnnnnnnnnnnnnnnnnnnnnnnnnnnnnnnnnnnnnnnnnnnnnnnnnnnnnnnnnnnnnnnnnnnnnnnnnnnnnnnnnnnnnnnnnnnnnnnnnnnnnnnnnnnnnnnnnnnnnnnnnnnnnnnnnnnnnnnnnnnnnnnnnnnnnnnnnnnnnnnnnnnnnnnnnnnnnnnnnnnnnnnnnnnnnnnnnnnnnnnnnnnnnnnnnnnnnnnnnnnnnnnnnnnnnnnnnnnnnnnnnnnnnnnnnnnnnnnnnnnnnnnnnnnnnnnnnnnnnnnnnnnnnnnnnnnnnnnnnnnnnnnnnnnnnnnnnnnnnnnnnnnnnnnnnnnnnnnnnnnnnnnnnnnnnnnnnnnnnnnnnnnnnnnnnnnnnnnnnnnnnnnnnnnnnnnnnnnnnnnnnnnnnnnnnnnnnnnnnnnnnnnnnnnnnnnnnnnnnnnnnnnnnnnnnnnnnnnnnnnnnnnnnnnnnnnnnnnnnnnnnnnnnnnnnnnnnnnnnnnnnnnnnnnnnnnnnnnnnnnnnnnnnnnnnnnnnnnnnnnnnnnnnnnnnnnnnnnnnnnnnnnnnnnnnnnnnnnnnnnnnnnnnnnnnnnnnnnnnnnnnnnnnnnnnnnnnnnnnnnnnnnnnnnnnnnnnnnnnnnnnnnnnnnnnnnnnnnnnnnnnnnnnnnnnnnnnnnnnnnnnnnnnnnnnnnnnnnnnnnnnnnnnnnnnnnnnnnnnnnnnnnnnnnnnnnnnnnnnnnnnnnnnnnnnnnnnnnnnnnnnnnnnnnnnnnnnnnnnnnnnnnnnnnnnnnnnnnnnnnnnnnnnnnnnnnnnnnnnnnnnnnnnnnnnnnnnnnnnnnnnnnnnnnnnnnnnnnnnnnnnnnnnnnnnnnnnnnnnnnnnnnnnnnnnnnnnnnnnnnnnnnnnnnnnnnnnnnnnnnnnnnnnnnnnnnnnnnnnnnnnnnnnnnnnnnnnnnnnnnnnnnnnnnnnnnnnnnnnnnnnnnnnnnnnnnnnnnnnnnnnnnnnnnnnnnnnnnnnnnnnnnnnnnnnnnnnnnnnnnnnnnnnnnnnnnnnnnnnnnnnnnnnnnnnnnnnnnnnnnnnnnnnnnnnnnnnnnnnnnnnnnnnnnnnnnnnnnnnnnnnnnnnnnnnnnnnnnnnnnnnnnnnnnnnnnnnnnnnnnnnnnnnnnnnnnnnnnnnnnnnnnnnnnnnnnnnnnnnnnnnnnnnnnnnnnnnnnnnnnnnnnnnnnnnnnnnnnnnnnnnnnnnnnnnnnnnnnnnnnnnnnnnnnnnnnnnnnnnnnnnnnnnnnnnnnnnnnnnnnnnnnnnnnnnnngttgcgtaccatatctgtgaggannnnnnnnnnnnnnnnnnnnnnnnnnnntgggnncggatcccgcgtgaacttcccaccgngcgtccggccatgctgcatattttnnnnnnnnnnnnnnnnnnnnnnnnnngtggggccaatcagttttanagnnnnnnnnnnnnnnnnnnnnnnnnnnnnnnnnnnnnnnnnacanagcttcagtcggccatnnnnnnnnnnnnnnnnnnnnnnnnnnnnnnnnnnnnnnnnnnnnnnnnataccgaagaggtgatgctggacaaaattaccggaaaaacgccggtggcggcctatgtctccccggttgttgaaggaaaagtgctgcgtcatcgcggtagtgaaacccgcgtgttacgtccgggctacgtcaagccgaaacacgaatttaattaccagcaggcggttgagcgtcttcccggtgaagatccggctcaactgaacgacccggcctaccgtcgtctgcgtatcatcaccgataacctcaaacaggaagagcatgccattgtccaggtggaagaaatgcaggcggtgaatgccgtgctgtatggcaaatacaccatggaaggggatcagtttgatactgtcgaggtggattttggacgctctgaaggaaataacattgagcaggccgacggtaaaaaatggtctgagcaggaccgtgatacgtttgatccgacgcatgatattgacctctactgcgatcaggccagcggtcttgtgaatattgccattatggacggtactgtctggcgtctgctgaatggttttaagctgttccgcgaaaaactggatacccgtcgcggctcaaattcacaactcgaaacggcagtgaaagacctgggngcggtggtgtctttcaaagggtattacggcgatctggccattgtggtggcgaaaacgtcttatgtggcagaggacggtaccgaaaaacgttatctgccggagggcacgctggtcctgggaaatacggctgcagatgggatccgttgttacggtgccattcaggatgcgcaggcgttgtccgaaggtgtggtggcttcttcccgttacccgaaacactggctgaccgtgggcgatccggcccgtgaatttaccatgacgcagtccgcaccgctgatggtgctgccggatccggatgagtttgtggtggtgcaggtgaaataatccgtgagcgggggcgaaatgcccccgtgtcttttttcacagggggctgatatggcaacaaaagaagaaaatcagaaacgtcttcgtcaactggctggcctgctggggcgcgaggcggatatgtcggggagtgctgcggatattgcgcaacgtgtgtctgagtgggaagaggagcttgctgcttcccgggagggcattatgcctggtgatgagagcgggcctgagcaaaatcacacagacgatggtgagcagttgcacaacactgatgctacggatgatgttaaagcggtccgtgtgcggaaatgcctgcatgtgatggggtnntgcnnngagannnnnnntcnnnttgaactgacgtaccggggnntgcgtnnnnnnnnnnnnnnnnnnntggcgacagccatgatacagcncggaannnntnnnnatgcgtgannttcnnannncctnngatnntgccctcgccgggnnnnnnnnnnnnnnnnnnnnnnnnnnnnnnnnnnnnnnnnnnnnnnnnnnnnnnnnnnnnnnnnnnnnnnnnnnnnnnnnnnnnnnnnnnnnnnnnnnnnnnnnnnnnnnnnnnnnnnnnnnnnnnnnnnnnnnnnnnnnnnnnnnnnnnnnnnnnnnnnnnnnnnnnnnnnnnnnnnnnnnnnnnnnnnnnnnnnnnnnnnnnnnnnnnnnnnnnnnnnnnnnnnnnnnnnnnnnnnnnnnnnnnnnnnnnnnnnnnnnnnnnnnnnnnnnnnnnnnnggtcaaccacccgcagttaaccgnnnnnnnnnnnnnnnnnnnnnnnnnnnnnnnnnnnnnnnnnnnnnnnnnnnnnnnnnnnnnnnnnnnnnnnnnnnnnnnnnnnnnnnnnnnnnnnnnnnnnnnnnnnnnnnnnnnnnnnnnnnnnnnnnnnnnnnnnnnnnnnnnnnnnnacaggttgcccgngagacaaaggtnngccggaaannggttaaggaanngtccagactgaaacgggcgacggtcagaaatccgaatgccagaattatcgttaaccgcggtgatctccctgtgattaagctggggatcaggatgccggggcgtcgcccgaacagcatactcaaagccggtcagcatcggtatcagcgggcatttattcagcgattaaaaaatggtcgctggcatgtcatgcagcgtgtggccgggaaaaaccgttaccccattgatgtggtgaaaatcccgatggcggccctactgaaacaggcatttgatgagaatgttgaccgtatccggcgtgaacgcctgcctaaagaactggcatccgcgctgaaacaacaactgaggattgcaataaaacgatgaaacacactgacattcgtgccgcagtgctggatgcactcgagcagcatgaacacggggcgacgctgtttgatggtcgccccgttgtttttgacgaagaggatttccctgcgatcgcggtttatctgacggatgcagagtataccggtgaagagctggatgcagatacctggcgggccacgctgcatattgaggtgtttttaccggcacaggtaccggattcagagcttgatcagtggatggaaagccggatttacccggcgatgaccgcgatcccggcactggcaggactgattaccacgatggttacgcagggctatgagtatcgtcgtgatgacgatatggcgttatggagttctgcagatctgacttattccattacatacgagatgtgaggacgatatggcaacaccaaatccccttgagccggtaaaaggtgccggtaccactctgtgggtttacaacggcaagggtgatgcttatgcaaacccgttgtcagacgatgactggcagcgactggctaaggtgaaggatctgacgccgggcgagatgacggcagaatcctacgatgataactacctggatgatgaagacgcggactggaccgcgaccgggcaggggcagaaatctgcaggtgataccagttttacgctggcctggaaaccgggagaggaaggccagaaagggcttataggctggtttgaaagcggcgatgtccgggcctataaaatccgttttccgaatggcacggtggatgtgtttcgtggctgggtcagcagtatcggtaaggccgtgacggcgaaagaagtgatcacccgcacggtgaaagtgaccaacgtgggcaaaccttctgtagcggaagaacgcagcaaaattacgccggtcactgcgattaaggtgacgccgacatccggtacggtggcaaaagggaaaacaaccaccctgacggtttcttttgagccggaaagtgcnnnnnnnnnnnnnnnnnnnnnnnnnnnnnnnnnnnnnnnnnnnnnnngaaaaaacttagaaaacacccaaaaacccacagaatagtaaaaaacatctatgaattatggatttccagttatattcgctcggcgcagcgttagtgtttcatgaaatattttttcctgaatcatcaacggcaatggcgttaattctggcaatgggaacctacggtgcaggttatgtggcgcgtattgtcggagcnnttattttcggcaaaatgggcgacagaataggnnnnaaaaaagtgctctttattaccatcaccatgatggggatctgtaccaccttaattggagtgttaccgacctatgcacagattggtgtttttgcccccatcttgctggtgacgctgcgtattattcagggattgggtgcaggtgcggaaattnncggtgccggtacgatgctggcggaatatgcgcnnaaaggtaagcgcggaattatctcctcatttgtggctatgggaactaactgcggaaccttgagcgcaacggcaatctgggcctttatgttcttcattctcagtaaagaggaactgctggcgtggggatggcgtataccgttcctggcgagcgttgtcgtgatggtctttnctatctggttgcgtatgaatctgaaagaaagcccggtctttgagaaggttaacgacagcaaccaaccgacagcaaaacctgcacctgctggtagcatgttccagagcaaatccttctggctggcaacagggctgcgttttggtcaggcaggtaactccgggttaattcagactttccttgcaggctatttagtacagacgttattgtttaacaaagcaattccaacagatgcattgatgatcagttcgattcccggctttatgaccattccgttccttggttggttatccgataaaattggtcgcnngatcccgtatattattatgaatacctccgcgattgtgctggcatggccaatgctttctatcatcgtagataaaagctatgccccgagcaccattatggttgcactgattgtgattcataactgtgcggtgctgggattatttgctctggaaaacattaccatggcagaaatgttcggctgtaaaaaccgctttacccggatggctatttctaaagaaattggtggtcttatcgcttccggttttggtcctatcctggcgggtattttctgcaccatgacggaatcctggtatccgatcgccattatgatcatggcatattcagtgattggtttaatctctgcgctgaaaatgccagaagtgaaagaccgtgatttaagtgcgctggaagacgctgcggaagatcaaccgcgtgttgtaagagctgcgcaaccttccagaagtctgtaaatcctcaatcccttctcttaccggagaggggatttttattcatataacaaaacatgtagcnnnncanatttaaatttaaggaattgttatgggaaataatttgttatcagcaaaagcgacactccctgtttatgatcgtaataacctggccccaagaattgttcatttaggctttggtgcatttcaccgtgcgcatcagggcgtgtatgccgatattcttgctacanaacatttcagtgactggggatattatgaggtcaacttaatcggcggcgaacagcaaattgccgatttacatcancaagataatctttataccgttgcggaaatgtcggccgatgcgtggacggctcgcgtcgttggcgtcgttaaaaaagccttgcacgtacagatagatggcttagaaaccgtgttggctgcgatgtgtgaaccgcaaatcgcgattgtctctctgacaatcaccgaaaaagggtatttccactctccggcgaccggacagttaatgctcgatcacccnatggtcgctgccgacgtgcaaaatccccaccagccgaaaacagcaacaggggtgattgttgaggcgctggctcgcnntnannnngcagggcttcccgcatttaccgtcatgtcatgtgacaacatgccagaaaacggtcatgttatgcgtgacgttgtcacttcctacgcacaagccgttgatgtaaaactagcacaatggatcgaagataacgtgactttcccatcaacaatggtggaccgtattgtgcccgcagtgacagaggatacgctggcgaaaatcgaacagcttaccggtgtgcgcgatcctgctggcgttgcctgtgaacctttccgccagtgggtaatcgaagataactttgttgccggacgtccggaatgggaaaaagcgggagccgaactggttagtgatgtgctgccttatgaagagatgaagttgcgcatgctcaacggcagtcattcattcctggcgtatctgggttatcttgccggatatcagcacattaatgactgtatggaagatgaacattatcgtcatgcggcgtatgccttgatgttgcaggaacaagcgccgacgctgaaagtgcagggcgttgatttgcaagattacgctaaccgattaattgcacgctatagcaacccggcgttacgtnatcgaacctggcagattgcgatggatggcagccagaaattgccacagcggatgttggattctgttcgctggcatctggcgcatgacagcaagttcgatctgctggcgctgggcgtcgcgggttggatgcgttatgtcggtggtgttgatgaacagggaaatccgatagaaatcagtgacccactgttacctgttattcagaaggctgtacaaagtagtgccgaagggaaagcgcgcgtccagtcattgctggcgattaaggcgatttttggtggtgatttgccagacaatagcttgtttactgcaaaagtgacggaagcgtacttgtctttattagcgcatggtgcgaaagcgaccgtggcgaaatattccgtgaagtaaaaaaagcaatgccgccatcggcggcattcacaagcttagttcatgccgagacgaatcaggtccagtggtgccagtttctcttcacaaccttcaacaactacggtttttccgcggcggatttgctcagcggtcagaccttcagtatcaatcgacaggatcttgccagtgtgaccggtgccgctaaccataacacggctgccagtggtgattgcgttacggttacgatcgtaggtcgtcataggtgttttctcctttctgatttacagtcgaagcccacgtaacgggcgcaatataaatactcctgtcgagtgaaatattttttgtttttgatcaagctcacatcttttttgatgcatgcatgagccataaggcgggggaaaagactctcaccccggatgggatgagaggaaatgaattactcttcgctaaaccagtcgctattttccnggcggatctggcgcacggattcgctgatttcctgcaaatgttgcgtcattgcacgttctaccgcatcgccatcacgtttttgcagggcagagaatatatcaagatgcnggcgtaanagcatttctggtggagaaacatggtcgaaactcatatagcgcacgcgatcaacggtcgctttcaggttctcaatggtatcccacgccagttgacagtcggcaatctgcgtcaggagttgatggaagttgtcatcaagttcaaaaaaatcatccagttgcttgcgctcaatggcaatgcgttgctggtgaagattttgttccagttggtagcactggctttcggtaatcatactcgccgcccgacgcgccaccgcgcactcaatggcctgacggataaaactgccgttgcgcacctgggccatggaaattttgttgacgtagctgccacgctgcggacgaatttgaatcaggccgttttccgccagtttaataaaggcttcacgaaccggctggcgtgacacattgaaacgaacagaaacttctttttccgacaacggtgtgcctggtgcaatcaggcaatggacaatgtcgcgacgaagaatacgataaatctgctgattgacaggctgtgtgggattaagttgcgtttcgacggtcattcgttcttgcttgtgagtgagttaactgcatgagtctaccacttttttgtgacaagcaataacccggcagttacaccgggtataaaaattactgacggtggacattcagcccggcatagctttgggtaaccggcatcatttccagggtattgatattgacgtgagcaggcagcgttgacacccaccagacggcttcgctgacatcttctggcgttaatgcaacggtattttgataggttttttccgctttaccgtcatcgcctntaaagcggacattggaaaactcggtgccacccaccagacccggttcgatgtcggtgacgcgcaccgccgtaccatgcaggtccgtacgcagattcaggctaaactgacgaacaaacgctttcgtcgcaccgtaaacgttaccaccggcatacggccagctacctgccgttgagccaatgttaataatatgaccatgattacgttcaaccatacccggtaagacggcgcgcgtcatatataccaggcctttgttgttggtatcaatcatcgtttcccagtcttcaatgctggctttatgcgcaggctccatgcccaacgccagaccggcattatttaccaggatatcaatattgcaccactcggcaggaagcgatgccagcatctcttcaatagcggcgcggttgcgaacgtccagttgggcgatgtacagattatctcccagttcgtcttttaactcctgcaaccgttcctggcgacggccagtggcgataactttatgcccttgttgaataaaacgacgagtaatgcattcaccaaaacctgccgttgctccagttactaaaacgatcatctcactgttcctcaacgcttttgtgtgtcaataacatagcacgtgatgcttaagagcgggtaatactggtttgcaagattgcactccgttatcagtaagcctacgctatggaacacctcgcgttcaggagaagaaaatgacaacaattaatcctttccttgtgcaaagcacactgccgtatctggctcctcattttgatcaaattgccaatcatcactatcgcccggcattcgatgagggaatacagcaaaagcgggcagaaattgctgccatcgcgcttaacccgcaaacacctgatttcaacaatactattctggcactggaacaaagcggagaattacttacccgcgttaccagcgtcttttttgcgatgactgcggcgcataccaatgatgaattacagcgtcttgacgagcagttttccgctgaactggcggaactggctaatgatatctatctgaacggtgaattattcgcgcgggtagatgctgtctggcaacgccgtgaatctctggggcttgatagtgaatccatccgcctggtggaggtgattcatcaacgttttgtcctagccggagccaaacttgcacaagctgataaagcaaaattaaaagtactgaatacagaagctgcgacactgaccagtcagtttaaccagcggttactggcagcaaataaatccggcggtctggttgtgaacgatatcgcgcagctggcaggaatgagtgagcaagagattgcgctggcggcagaggcggctcgcgagaaaggtctggataacaaatggctgattccgctgctgaataccacccaacaaccggcgcttgccgaaatgcgcgatcgtgcgacgcgtgaaaaactgtttattgcgggctggacgcgagcggaaaaaaatgatgccaatgatacccgcgctatcattcaacgtctggtggagatccgtgcacaacaggctacattactcggttttcctcattatgccgcatggaaaatcgccgatcagatggcaaaaacacctgaagcagcactcaactttatgcgggaaattgttccagcggcgcgtcaacgtgcgagcgatgaattagcctccatacaggcggttattgataagcagcagggcgggtttcgcgcgcagccgtgggactgggcattttatgccgaacaggtccggcgagagaaatttgatcttgatgaggcgcagctcaagccatattttgaattaaacacggtgttgaatgaaggtgtattctggaccgcgaatcagctcttcggtattaagtttgtcgaacgttttgatattcctgtctaccatcctgacgttcgggtgtgggaaatttttgatcataatggcgtggggctggcgttattttacggtgatttcttcgcccgtgattcaaaaagtggcggtgcatggatgggcaattttgttgagcaatcaacgcttaatgaaacgcatccggtaatttataacgtctgcaattatcagaaacccgctgccggtgagcctgcgttgttactctgggatgatgtcataaccttattccatgaatttggtcatacgctgcacggcctttttgcccgccagcgttatgccacgctctccggcaccaacacgccgcgtgattttgtcgaatttccgtcgcaaatcaacgaacactgggcaacgcatccgcaggtattcgctcgctacgcccggcattatcagagcggggcagcaatgcctgacgaactgcaacagaaaatgcgtaatgccagcctgttcaacaaagggtatgagatgagcgaactgcttagcgccgcacttctcgatatgcgctggcattgcctggaagaaaacgaagcaatgcaggatgtcgatgattttgaattgcgggcgctggtggcagaaaatatggatcttcctgctataccgccacgctatcgcagcagttattttgcccatatttttggtggcggatatgccgcaggttattacgcttatctgtggacgcaaatgttggccgatgatggttaccagtggtttgttgagcagggcggattaacgcgtgaaaatgggctgcgttttcgcgaggcgatcctttccagaggtaacagcgaagatctggaacgcctgtatcgacaatggcgcggtaaggctcctcagattatgccgatgctgcaacatcgtggcttgaacatataaacaccaccaatggctgtcctggagatatcgccaggacagcctggttatagcagtaactgcagcagctgggcgagggcaaacctcaccgctaaagctaataccgtttcgcagtcgccagcaaaatgcataaccgcagtgtagttctggcctttaatatgccacgcgaaccagacggtacccgctggcgtaccatattcaccgccctccggtccgccgtagccggtaatggcaatactgacatcagcatccgcacgctctatggcaccggttgccatttctgctgccactttctcactcaccgcagaatatcgttcaagagattgctggcttacgctgaggattttcatctttgcctgatcggtgaaagtaacaaagcctgcaccgtaaaatttgggtgtatcttcagctgcacacagggcgctagccaacttaccgccggtgcatgattcggcggtagttaagcgtaattgatccgcgataagtctttgactcaacgcggatgtcaggttttcaatagtgtcggtatctgcaagttgtacaattttatttctattaatgttcactgttttttgtccacgcttttatatgtaaaggtgatttgctttttctgtatgctcgtccaatataataattttcaaacatataaatccgattattctgaaaatatgtttaagactcttcaatcttcttaactttagtgagttaaattctctgaatatttgacagctagttggctgattttaaatgccttataacaattggcagtattcttatttggcaattntaaaaatagcaaccagacttaataagtcaaaccaaacgcaattaaggagttagtatgaaatttcaggccattgtattagcaagttttcttgtcataccttatgcgttggcagatgaccagggcggtttaaaacaggatgcagcgccaccgccgcctcatgcaatagaagatggctatcgcggaaccgatgatgcaaaaaaaatgactgttgatttcgcaaaaaccatgcacgatggcgcttcggtttcactacgcggtaatttgatttctcacaaaggagaggaccgttacgtttttcgcgataagagtggtgaaattaatgttgttattcctgcgaccgtttttgatggacgagaagttcagccggaccagatgatcaacattagcggcagtctggatnagaaaagcgcgccggccgtcgttcgggtcactcatttgcagaaataaaaataaattagcctgatggcctgaactaccgggccatttgggtactgggttatgctatttgtcatcctttcatttgcgataatgaagaggtaatttacagaattaaacacttttttatccgctgattttgttttaaatcacaatgttatctcagagatgaatcataacttcggatttctatgaaaatattgacgtaattttgcttttctctcgttagaatagcgcgcacaaggaactgtgaaaaaggagtggcaatgatcaagaagacaacggaaattgatgccatcttgttaaatctcaataaggctatcgatgcccactatcagtggctggtgagtatgtttcacagcgtggtcgcgagagatgccagtaagccagaaataacggataaccattcttatggactgtgccagtttggtcggtggattgatcatctggggccactcgataacgatgaattaccttacgttcggctaatggattctgcccatcaacatatgcataattgtggtcgggaattaatgctggctattgttgaaaatcactggcaggacgcgcatttcgacgcctttcaggagggggtgctttcttttactgcggcattaaccgattacaaaatttatttgctgacgatccgtagcaatatggatgttttgacgggattgccggggcgtcgggttcttgatgaatcctttgatcatcagttacgcaacactgagcctctgaatctttatttaatgttgttggatattgaccgatttaaattggttaatgatacctacgggcatttaatcggcgatgtagtattacgcaccctggcaacttacttagccagttggacgcgtgattacgaaacggtttatcgctacgggggcgaagaatttatcattattgtcaaagcggctaatgatgaagaagcatgtcgtgcaggtgtcagaatttgccagttagtcgataaccatgccatcacacattctgaagggcatatcaacattaccgtgacagcaggtgtgagtcgcgcatttcctgaagagactctggatgtggtcattggaagagcagaccgggcaatgtatgagggtaagcaaaccggaagaaatcgctgcatgtttattgacgaacaaaatgtgattaaccgagtttaagctccgtttaacattcattgagaaaactgatgctactgtgtcaacgatccgttatcagtgcaggaaaatgcctgttagcgtaaaagcaaaacacaaatctatccatgcaagcattcaccgccggtttactggcggttnnnnnncgccntcataaaaatcaggccccttgtacacaactgtaacaaggggccggttaggtgagggattatctccgttcattagtcatcccatttgtggctgaaatacgcggccagaaaaccagaaaataaaattattcccagtatggccataaaaacattcatattacccagcattatttgcctccgtttatggtgtggtgtgtttcctcgcttaccttaatttttatctcaatgagaaagatattagcagaggttatctaaacaaaggctgaatcaggcgattattgtgatggggaacggctgtttttgcgatattgcgaaggagataataaaaaacgttggtgaaagtgatgacgcaataacgctgaattgccaaaacctgtcagctcggcaaatttctcgatgttaaaaaccgaattttgcagataatcctgtactcgtattaagcgctcattgagcagccagcgggcgggcgtcatgccagttaacgcctcaaaacgtcttaaaaaagtgcgcggactcatatttacccgttcggcgagggaagacacagtatgtgtttgtgccagattctgctgcaaaaagtcgaataaggcacctaacgtctggctttcacgcggngaggccattgggcgcgtcagattttgtggttgatccccctggcgatgtggctgaatgaccagtcgccgggcgacattattagcaatctcatgaccaaaatctttgcgcacgatatgtaaacacagatcgatccccgcggcgcttccggcggaggtcatcacttgtccttcatcctgatataacacattgtcacttacgctgattgaagggtaacggtgctggagttgttcagtgtagcgccagtgggtggttgcttttcgctgatgaagaaggcccgcagcagcaaggacaaacacgccagagcatattgataccaggcgagtaccgcgctggtgtgcctcgcgcaatgactggcatagcatctccggcactttggcatctattccgcgccagccaggaataataatcatatcggcgttgggcaataactccagtccaccatcagcaaccacgtggatccccccggtggcttgtagcgcacctggttctaccgcagcaacagcaaaacgataccagttatcgcccagttccggtcgtggcaggccgaatatttcaacggcaacgccaaattcaaaagtacatagcccgtcatatgccagtgcaatgaccagcggacgttgtaacgttgtcatcattttgctcatttctggcatatcgagaggcggtcagtgaaaggtagattagttacattattgttaacacaacaaaccaaaaggacaaagcaatatgcgttatgtcactgaatttaccacagcgaagccagaagttgctgaggcgcatnnnntcgcgcgcttgagtgtcgaaacagattgcgccgatgttcatgactctctggcttatattggcgatgatttcgttttacttcatgtggttggacgtgaagaggacttcgcgcgtcggcatatcccaggcgctctccatttaccccataagcaaatgaccgcagaaagaatggccgaatggcccgacgatacgctatttgtggtgtattgcgcggggccacattgtaacggtgcagaccgtgcggcactcaaactggctcgactcggaaagccggttaaaatcatgctcggcgggataaccggctgggaagatgaaggctatgcctttgcctcagaataatgattagcgaagccgtgccagtagtggaacggcacgaacgtcaacagagtgctggttgcctctggggtctggcgttaataccttttaacatcagcgcccacgcggcaatgatgactaacgccagaatgataaacagcgaagacgacgggagagtggtaagtacaacaccactcactaatggatttaccgctgcgcccaaccagcctaatgactgggcggaaaaatagctggctttcattcctggcggcgcaatatggtcaatcaacatatactcgcccggcgcataaattatttcaccgacagtaaataccgcagctgacataccccacaatagcaggctgttgccggaaaaaataaaaccgatcagaccgatgacgaaacagagggtgcctgctgtcatcagcgcgcggatgttagccgggttaaggcggcggcccacggaatattgcaacgtaaccaccatggcagcattcactggaagaacaaccgcgaccaccttttcggcaaaatcaccatcagcaatcaccatcacatattgtgaaatgcatgaagcaaatgcgccactaacaaaagaagccagaaagccagagcaggtaaaccacaacagtgccttatcttgtaataaaactttcggcgaccagacactgcctgtttccgtggcgatgattttctcgctgcgctttacccaaatttgaatgaaaaacatgggaaacgcagagcagatagcggccagccaaaagggcagattgatgctctgcatgaccaacagcgtgccgagtggcgggccgacggtccagccaatattgagcatggtgtagttgatcgagaagatcttcgttttgctggtggatgaaagattgtcggcaaaccaggctttcagcacggtagcaaaaacggaataggcgcagttaatgagggcaaaaaagagcaccaccagcgtcacgttattcactaaaggaatggcaataaaaccgctggcgaaggcggtaattgccagtaacatatagcgtttcttgtcgaanttatccgccaggataccaaaaccgaggctaaaaacgacgccaatagtgagcgcaattgtcatcgcataaccgattagatcgacactcaggctgtactggcgactcaagtaaatggtcataaatggcagcgtggcgccgcgtccgatggttaataacaacgacgaggcaagaagggcgctggtagagcgtcgtagggataagttcatttgtctgtccggcagtgcgtttcgttatgttttgttttagagatgtaaagaantnnnntggcaaaaatccgaagtatagcgacttatttgcgcattaatgccgtcgtaaccggcgactaacgaatcaactgttaaagaaaagtaaattcagctaagttgattgcttacaaaagatgaaattcagaggcggtagaatgtcgcgaaaagatggggtgttggcgctactagtcgtcgttgtatgggggcttaattttgtggtcatcaaagtggggcttcataacatgccaccgctgatgctggccggtttgcgctttatgctggtcgccttcccggcaatctttttcgtggcacgaccaaaagtaccgctgaatttactgctggggtatggtttaaccatcagttttgcacagtttgcctttctcttctgcgccattaacttcggtatgccggctggactggcctcgctggtcttacaggctcaggcgttttttactatcgtgcttggcgcgtttacttttggcgaacggctgcacggtaagcaactggcggggattgcgttagcgatttttggcgtactggtgttaatcgaagatagctttaacggtcagcatgtggcgatgctcggctttatgttgactctggcagcggcatttagttgggcgagtggcaatatcttcaacaaaaagatcatgtctcattcatcccgtccggcggtaatgtctctggtcgtctggagcgcattaatcccgataattccgttttttgtcgcctcnctcattctcgatggctccggaaaaatgattcacagtctggtcactatcgacatgaccaccattctggcgttgatgtatctggcatttgtagcgacgatagttggctacgggatttggggtacgctgcttggacgctatgaaacatggcgtgtcgcaccattatcattactggtgccggtagtcggtctggcaagtgcagcgttactgctggatgaacgcttaacaggtctgcaattcttaggggctgtgctcattatggccggactgtatatcaatgtatttggtttgcagtggcgtaaagcggtgaaggtaagangttaacaagccccgatatgccggggcctgaatatactacatggcttgttggttataatagggcacgcccagcgcatccgatttgtcactgcctgtacccatgtgatttaaatcgaacggtggttgttcctgcgatgggggaacaaccaccacatcgccacaggaagtaacgagcggttgctgggtttgttccgcaacgccctgcgcggaaaagagaataagcgcagctgctattgcggataaaagcggtttcataattgcctcagtgacgttgtcacgttttcaactagctgttgtaatggtttaatggatgtaaaaagcgcgattcgccctgcatattggtcatccggtatttatgcggcggaacatcaaagtaatttttgaaggttcgggtcagagtttgttgcgactcgaagccatatcgttctgccagatagagtatcggctcgttactttccttcagcttttgcgcgatttccgtcatcttacggctgcggatgtattggcctaatgaatgaccggtttcttttttaaacatccgttgcaggtgccatttagagtaacccgaacgctctgacactttctccagtgacagtggtgattccaggttgtcctcgatccagtccaaaatgctatgaatggtaatagcgtcagtattgcgtctggacatcgtcatacctcttttttgtttacggcaggactttcttaagcaaatgctcaagtgttgccacttcgtccgccgtcaggttttttgttaattcttgatgcaggtcctggccaactaattgatggcattgttcacatattgccgcgccgctggtggtaagttttaccagtacgccgcgcttatcattcgggttcggcaacctttctacccagcctttacagaccaggcgatccagcatacgggtcagtgctcccaggtcgaccgacaacacttttttcagttcaaccggagtaatacacgccgcgcagcggatagagcagagcaccttaaactgtgccgcggtaatatccagcggagacagatactcgttaagcagacgatctttcttctgattaaccatatggattaagcgacccaatggaataatttcattgaacagatcgctggtacttttcacattagttgccctggcaagtaattagttgcaggggataatattgcccaggcaagtataagtcaaatgaatgaattgaccgatgccacgttttgctaaatcggttcaagttttggtcaatgcgatgcaaggttagctaaagagtgacactttatccttgtttaccccttatacttttcgctgataacccagatacacaggataacaaccaccaatgttagatttgtttaaagcaattggcctggggctggtggtgttactgccgttagctaacccattaacaactgtcgcgttatttcttggcctggcaggcaacatgaacggtgccgaacgtaatcgtcagtcgttgatggcctcggtgtacgtctttgccatcatgatggtggcgtattacgccgggcaactggtgatggatacatttggcatttcgattcccggtctgcgaattgcaggcggcttaatcgtcgcgtttatcggttttcggatgctttttccgcaacanaaagcgattgattcaccggaggcgaaaagcaagtcggaagagctggaagatgaacccagcgccaatattgcttttgtaccactggcaatgccaagtaccgccggtccgggaaccattgcgatgattattagctcggcgtccacagtgcgtcagagttcaaccttcgctgattgggtactgatggttgcgccgccgctgatctttttcctggtggcggttattttgtggggaagtctacgcagctctggcgcaattatgcggctggtgggcaagggtggcattgaagcgatctcccgcttgatggggttcctgctggtatgtatgggtgtacagtttattattaacggcatcctggaaatcattaaaacgtatcattaaaaaaggcccgaatgggcctttcaactattgcgtctgttcttcgagtgtcactggccagcggcgaaatataatgattgaccatattaacgcggcaaaagcaggcaccgtgcccacataaccaatcatcgacattgaccagtgcagactcacctgattacctaccaacgcacccgccccgattccaatattaaatatcccggagaatagcgccatcgcgnnnncggtggcatctggtgccagcgccagcactttaacctgcataccaagcccgatgatcatcatcgcgatcccccagaaaatactcagcaccccgaggtgtatttcactgttcgccgcaggtagcagcagtgccaggcacaccagcaacagcgcaatcgccgtacttaccaacgcagacgcatattgattacccagtttaccgaaaatcacgctgccaataatgcccgcaccaccgagtaataacagtaatgccgtggcaaagttggcgctgaatcccgcaatgttttgcacaaaaggctcaatatagctgtatgccgtgtaatgggcggtgacaaccaccacagttaacaaataaatgctcatcaatgccgggcggcggaataatagcgggaggcttttcaatgaaccggaatgctcactgggcagtaagggaagtaacttaatcaggcacaaaagggtaataagcgccccgataccaatcgcgaagaaggtcattcgccaaccgaaatactgccccacaatgcgcccgagaggtaatcctaataccattgccagtgctgtacctgtggcaattaaactcaatgcctgtgctcgcttcccggccggagccatacggatcgccagggacgccgtaatcgaccagaaaatcgcatgtgcaaaagccacaccaatgcgactgatcaccagaacggtaaagctccacgataaaaacgacagtacgtggctggcaataaacaccacaaacaggcagatcagtaatttgcgccgttcaacctggctggtcattaacataaaaggcaatgacattagcgctactacccatgcgtaaatggtcaacatgatgccgacctgagcggtttgcatgtgaaaactttgcgcaatgtcagagagcaggccaacagggacaaattcggtggtgttgaagatgaaggcggcgactgccagcgtaacgacccgtagccacgccactttgcgggaaacagtgtttgttgtcataannnnattatcgggtgagttgcgaaaaagtgatgaaatgatcttaaaacggttaatgatgtgaatacaatgcatttgtgatctggatcgcgttttccgtttctctgacgctgattctttcacgcgtcagagagatggtaaacatcacggtttaatgacgatcaggaatgtctggcgttttggaggttgcgggtataggtggtctgacaggggagcgaggcctgtttttcaccagatcttcatgagtaacttttggcggtgtttcattttttacaaacagtttgagggtcnnnngcgccatatgtttgataattttatcatcacttaatgatgctggcatcaacacgtcattcaaatcactttcattgggattcataaattggtgatagtgtaacaacatattggcgaaaaataaaaacaagccctgaaaatgaggagattcttgttctgctaaaagggataaaaaacagatgcagacttagggtagtacatgtttgttagaacctaatgaatccatcaggctttgcaataaatcctcttttaattcgctgtccgttatgtcgagaatggcggtgatcaagttaggatctttattgacgaaccatctgtgaacctcagagttattccataatcgggggagtatgacaaaattaccgcgagagataaaattcaggacaagcaaatcaaactggcgtaagtaatctgcagcggtatggtgatccggaggcaggggttcaatatgtggtgtatgcgctcttttgatgggaacgccagggttgatcattgggaattgttcaataaaatcattcagaaacagaaagagcacacgctcgacgccggtctgaaatacgcgccccatagtaacaggctttgggttgggagcgcaaaaaatattaatttctccatcatggcggaaattatctaaataaatagggcttaaatttattactacctgaaattcaatattttctttgtgtcttccattcctggcgggataagtgagtttaaactgaaccttttcattgtatagcgtgtcgttaccccgaaaagaagtcctctgaatatatgataagttgtcaagattattaaatatcttttttgtggctgagttgatgtttaaagacgtgcgccactcttcattacatattattgtactaagtgcatcaataaaatcctttaaaacttcttttacctgcggtgcaatattacgaacgggaaaatcatcaggaagagatatgtaattgctgatgcttactggcgtaaccatatttgccccatatagtcataagtcatcggaacatcactatatagagcatattagccgcaagaactatcaaaaatagctcattggtaaccctgttttgtcgagtcaggcacatccagtagttgaataaatgcctcgagcggacgcgttttcgcaccacgacgccagaccagccaggttgttagccaacaccattgctcagctaacggccacgcttcaacctggtgatgccccggcatactttccagcatagagcgcggaataagcgcaatacctgctcctgcgaccacacaggccaacattccgtgataagactccatctcatggatagttcccggagcggcaccgtcagcatgaaaccagctctcgaagtggcgacgatacgaacaattggcgcggaaggcataaatgttactgccattaacctgactggcacggattactggcgcatgaccttgtggcgtgacgatcatcagctcctcgcggtataccggtatcccgtcaatggcagtatggttaatgggtccatcaataaacgccgcattaagttttccctccagcacaccttccagcatagtgccggaagggccggtggaaagtgaaaactgaattttgggataacgacggttgaattccgccagcgtggccggaatgcgaactgctgcggtgctttccagcgaacccaganaaaataaaccttgcggctcatcgccagcgacaacgctccgcgcttcatccactaacgcgagaatttgttggctatagcgtaaaaagttatgcccggcaggagatagacgtaaacgttgattctcgcgaataaacagatctacccccagttctgtttccagctggcgtagacgggtagtgagattcgacggcacgcgatgcactattgctgcagcctgcgtaatgctgccagcttcggcaaccgcgttgaacatctccagctgggtcagatccataatattctcgattcgtgaataagtggcttaatattattcattttaaagcaagagtaaatctgcgtatcttcataccatgactcataaaggagataccccgatgaccattactccggcaactcatgcaatttcgataaatcctgccacgggtgaacaactttctgtgttgccgtgggctggcgctgatgatatcgaaaacgcacttcagctggcggcagcaggctttcgtgactggcgcgagacaaatatagattatcgtgctgaaaaactgcgtgatatcggtaaggctctgcgcgcccgtagcgaagaaatggcgcaaatgatcacccgcgaaatgggcaaaccaatcaaccaggcgcncgctgaagtggcgaaatcggcgaatttgtgtgactggtatgcagaacatggtccggcaatgctgaaggcggaacctacgctggtggaaaatcagcaggcagttattgagtatcgaccgttggggacgattctggcgattatgccgtggaattttccgttatggcaggtgatgcgtggcgctgttcccatcattcttgctggtaacggatacttacttaaacatgcgccgaatgtgatgggctgtgctcagctcattgcccaggtgtttaaagatgcgggaatcccacaaggcgtatatggctggctgaatgccgacaatgacggtgtcactcagatgattaaagactcgcgcattgctgctatcacggtgaccggaagtgttcgtgctggagcggctattggtgcacaggctggagcggcactgaaaaaatgcgtactggaactgggcggttcggatccatttattgtgcttaacgatgccgatctggaactggcggttaaagcggcggtagccggacgttatcagaataccggacaggtttgtgcagcggcaaaacgctttattatcgaagagggaattgcttcggcatttaccgaacgttttgtggcagctgcggcagccttgaaaatgggcgatccccgtgacgaagagaacgctctcggaccaatggctcgtttcgatttacgtgatgagctgcatcatcaggtggagaaaaccctggcgcagggtgcgcgtttgttactgggcggggaaaagatggctggggcaggtaactactatccgccaacggttctggcgaatgttaccccagaaatgaccgcttttcgggaagaaatgtttggccccgttgcggcaatcaccattgcgaaagatgcagaacatgcgctggaactggctaatgatagtgagttcggcctttcagcgaccatttttaccaccgacgaaacacaggccagacagatggcggcacgtctggaatgcggtggggtgtttatcaatgggtattgtgccagcgacgcgcgagtggcctttggtggcgtgaaaaagagtggctttggtcgtgagctttcccatttcggcttacacgaattctgtaatatccagacggtgtggaaagaccggatctgacgcgacatattcagctctgatatactcgcaggtcttttcagacctgcggtccaggagtagaaagtggcagtcgccatggataatgcaattttagaaaacatcttgcggcaagtgcggccgctcattggtcagggtaaagtcgcggattatattccggcgctggctacagtagacggttcccgattgggcattgctatctgtaccgttgacggacagctttttcaggccggagacgcgcaagaacgtttttccattcagtctatttccaaagtgctgagtctcgttgtcgccatgcgtcattactccgaagaggaaatctggcaacgcgtcggcaaagatccgtctggatcaccgttcaattctttagtgcaactggaaatggagcagggtattccgcgtaatccgtttattaatgctggtgcgctggtggtctgcgatatgttgcaagggcgattaagcgcaccacggcaacgtatgctggaagtcgtgcgcggcttaagcggtgtgtctgatatttcctacgatacggtggtagcgcgttccgaatttgaacattcnncgcgaaatgcggctatcgcctggctgatgaagtcgtttggcaatttccatcatgacgtgacaaccgttctgcaaaactattttcattactgcgctctgaaaatgagctgtgtagagctggcccggacgtttgtctttctggctaatcaggggaaagctattcatattgatgaacctgtggtgacgccaatgcaggcacggcaaattaacgcgctgatggcgaccagtggtatgtaccagaacgcgggggagtttgcctggcgggtgggactaccggcgaaatctggcgttggtggcggtattgtggcgattgttccgcatgaaatggccatcgcagtctggagtccggaactggatgatgcaggtaactcgcttgcgggtatcgccgtccttgaacaattgacgaaacagttagggcgttcggtttattaatgcagtctctcgatccactcttcgcgcgtttatcccgttcaacatttcgatctcgctttcgtttgggcatgaaagagcgtcagtattgtctggagaaaggcgcgccagtcatcgaacaacatgcggcggattttgtcgctaaacgtcttgctccggcattaccggctaatgacggtaagcaaacccccatgcgcgggcatccggtgtttatcgctcagcacgccaccgcgacctgctgtcgcggttgtctggctaagtggcataacattccgcagggtgtttcgctaagcgaagaacaacaacgttatatcgtggcggtaatctatcactggctggttgtacagatgaatcagccatgagaattgcggaaaacgacaaaatagcattcccagggtacctttatttgccgccgctgtcagcgaacatgctatcctttatgagaatttacttattacgttgagataattgccacccgcaattgtatggacagataattaatgcatgtacaccccatttcaactttccgtgtgttccaggaaggtcatctgctacgtaatagcatcgctatttttgcgctaaccacgctgttctattttattggtgcannnnnnnaggctggttcacgaactttctcttttctggccgctgaatggcgtaatggcgggggtgtttgcccgctatgtctggcttaatcgactgcattactatgcgatcagttatgtggcgatgctggtttatgatgccataaccaccgaatggggactggtttcactggctatcaatttctccaatatgatgtttattgttaccgtcgccttactggtcgtgcgggataagcgtttggggaaaaataaatatgagccagtaagtgccttacggctatttaattactgtctgattgccgcattattatgcgctattgtcggggcgattggttcggtcagtattgatagtctggatttctggcctttgcttgcggactggttcagtgagcaattctcaacgggcgtgttgatcgtgccttgtatgctgacgttggctattcctggagtgctgccgcgctttaaagcagaacagatgatgcccgccatcgcgcttattgtgtcggttattgcctcggtagtcattggcggagcggggagtctggcgttcccgctgcctgcattaatctggtgtgcagtgcgctatacgccgcaggtaacatgtctgttgacctttgtcaccggtgcggtggaaatcgtactggtggctaattcggtgattgatatctcggtcggttcgccgttctccattccgcaaatgttctccgcacgtctcggtattgccacgatggcgatatgcccaattatggtttcttttagcgtggcagcgatcaattcgctaatgaagcaagttgcgctgcgagccgactttgattttctgactcaggtttactcacggtccggtctttatgaggcgctgaaaagtccatcgctgaaacagacacaacatctgactgtcatgctacttgatatcgactatttcaaaagtattaacgataactatggacatgaatgtggcgataaagtgttaagcgtgtttgcccggcatattcagaagattgtcggtgataaggggctggtggcgcgcatgggcggcgaagaatttgctgttgcagtgccgtcagtgaatcctgtcgatggtctgctaatggcggaaaaaatccgtaaaggcgttgaactgcaaccattcacctggcaacaaaaaacgctttatctcacggtaagtattggcgtcggtagtggtcgcgcatcgtaccgaacgctgaccgatgactttaataaattgatggtcgaagccgatacctgtctgtatcgctcgaagaaagatgggcgcaactgtaccagcactatgcgttacggcgaggaagttgtctgacatctttattcattccgcgcgatttgaatgcaatgtgttctaccactttatgatccaggaaaaggcgtatttcctcgattaaaccatgatccgcgccacacttttctcataaaactgctcattaatcatcaggagttgatcaaaacaggggttcgtcgtattaaagtttgctaacctgtcgtaccaattcaaacaggttgtatgactaatcagaagggaacccattgtgaaaacactaaatcgtcgcgattttcccggtgcacagtatccagaacgtatcattcagtttggtgaaggtaacttcctgcgcgcctttgttgactggcaaatagatctcctgaatgagcacaccgatctgaattctggtgtggtcgttgttcgtccgnttgaaacttcattcccgccgtcactgagcacgcaggatggtctgtacaccaccattatccgtggcctgaatgagaagggggaagcggtcagcgacgcgcgtctgattcgctctgttaatcgtgaaatcagcgtctacagtgaatacgatgaattcctgaaactggcgcacaacccggaaatgcgctttgttttctctaacaccaccgaagcgggtatcagctaccatgcgggcgataaattcgatgacgcgccagcggtaagttatccggcaaaactgacccgtctgctgttcgaacgttttagccatttcaacggtgcgctggataaaggttggatcatcatcccgtgtgagttgatcgactacaatggcgacgcgttgcgtgaactggtgctgngctatgcgcaagagtgggcactgccagaagcatttattcaatggctggatcaggctaacagcttctgttctacgctggtggaccgtatcgttaccggttatccgcgtgatgaagtggctaaactggaagaagaactgggttatcacgatggtttcctcgacaccgctgaacacttttacttgtttgtgattcagggaccgaaatccttagcgaccgagctgcgtctggacaaatatccgctcaacgtgctgattgttgacgatattaaaccgtataaagaacgcaaagtggcaatactcaacggtgcacacaccgcgttggtgccggtggcgttccaggcagggctggataccgtaggtgaagcgatgaacgatgctgaaatttgcgcattcgttgaaaaagccatctacgaagaaattattccggtactggatttgccacgcgatgaactggaatctttcgccagtgcagtcaccgggcgtttccgtancccgtacattaagcatcagctgctgtctatcgcgctcaacggtatgaccaagttccgtacccgcatcctgccgcagctgctggcagggcagaaggcaaacggcacacttccggcgcgccttactttcgcattagcggcattgattgcgttttatcgcggtgagcgtaatggagaaacatatccggtacaggacgatgcacactggctggaacgttatcagcaactctggagtcagcatcgtgaccgtgttatcggtacccaggaactggtagcgattgtgttggcagaaaaagaccactgggagcaggacctgacgcaagtgcctggtctggtcgagcaggtggctaatgacctggatgcgattctcgaaaaagggatgcgcgaagctgtacgtccgttgtgctaatactctgaacccggtttcgaccgggtttcttatttcattatattagttacaacatcctataagcctttatcattaacaggtgccacatgcagcacctgttaatgttgtaattttgtaggtaatttgtaagtagcgtcttgagaatgtgatcgtaatcacgtttaatagggcgacttttccacgcctgaagataaccatgattgttcgtccacaacaacactggctgcgccgtatttttgtctggcatggctcagtattatccaagatatcctcgcgcttactactcaattttctcttttctatcgctgttattttcatgctgccctggtacacgcatctgggcatcaaattcaccctcgcaccgttcagcattctcggtgtcgccatcgccatttttcttggttttcgtaataatgctggttacgcccgttacgttgaagcgcgcaaactttgggggcagttgatgattgcctcacggtcgttactgcgcgaggtaaaaacgacattgccggattcggcaagtgtaagggagtttgcccggctgcaaatcgccttcgcccactgtttacgcatgacattacgcaaacagccacaggtggaagtgctggctcattatctcaagactgaagatcttcagcgtgtactggcttcgaactctccagctaaccgcatcttgttaataatgggggagtggttggcggttcagcgacgcaatggacaactttcagatatcctgtttattagcctcaacgatcggcttaacgatatttcagcggttctggcaggctgcgagcgcattgcctacacgccaattccctttgcctacaccctgattttgcatcgtaccgtttatctgttttgtatcatgctgccgttcgcgctggtcgtggacctgcattacatgacgccttttatctctgtgctgatttcctatacttttatttcgctggattgtctggcggaagaactggaagatccgttcggtactgaaaacaatgatttaccgctggatgccatctgtaacgctattgaaattgacctcttacagatgaacgatgaagccgaaattccagcaaaagttcttcccgatcgccattaccaactgacgtgatatttactccgtacggcgggcaacaataaacagacgcggaaatgccagcagtatctgtccgttctcttgcagtggatactgctctttcagcatctgatggtagcgcgtaagaaaaagctgctgttcgctctcggtcagatcctgtaaccacggacgtaatccagtggcggtcacccaatcgataatcgcctggtgcgacggcatctggtgatagtaggtggttcgccagatatcgacctcacatccggcttcgctcaaaatatcgtagtaagcatgaacaccagccaacggctcacgcccgcgatccgggtagttttgttcccaggcaacttcgcgcatgagcacatgggtcggctccagccagttatctggcatctgtactgccagcacgccctgcggattaagtaaagaaaccaagtgaggaaacaattcgtagtggtcgggcagccattgcagtgaggcattagcaaaaatcagatcgagtgcctgttccggttgccagttgcggatgtctgcttccacgaactggcagtctggcaaagcactgcgcgcttcagcaatcatcgccggagacgagtcgatgcccgttatcctggcagcaggccaacgttgatgcagcagggcggtgctgttacctgggccacagccaagatcggcaacataatcgacattctccagcggcactctggcaagcagctccaccgccggacgcgatcgttcagcggcaaagtgcagatataaagaggggttccagtcagacatttatttactcccgtcagcgcgttaccccaattgtagataaaactgataaattcgcctcacggcatcaacccattgaacagacgttttttacgcggcccggtcattaaagattccagtttcgcgacacaggttttgtagtggggcgtggttttatggaacgccactgcgtcttcatctttataggcttcgtagatataaaagcgcgaattcacttccgggtcctgtaagacatcgaagcgcaaattgccttcttcctgtacagagcccaggtggttctggcgaaaaacttcgataaactcgtcaaccttgtcttcatgaacgttaatttcaaccagtgtgacgtgcataattcttctccttaaatccgcagttactgtttttcactcagatagagttcatatgcccgatcagccgtttcgttatggtgaaccaccgcctgtacggctttcatcatcgccaccggatggtcagactggaaaatattacgccccatatccacaccagaagcgccctgatngatagcctgccagcacatttccagcgcctcgcgctccggtaattttttaccgccagcaataacaatgggtaccggacatccggcaacaatccgttcaaaacctttttcgacataataggttttgataatttgcgcccccatttcagcggcgattcgagtcgcgagcgagaaataacgctgatcgcgcaccatgtctttgcccacgccagtcacggccatggtcggcattcccactttcattccggcatcgaccagctgaataatatttttgatcgactgatgttcatattcgctgccgatataaacctgcgccgccaccgcgcaactgttcaggcgcacggcgtcatccatcgataacgccacggcttcattgcttaattccgccaggatagagttcgcacctgacgcccgcagtaccaccggcttattggtcgccgggggaactacgctgcgcaaaatcccgcgcgtacacattaatacatcggcatgttcaaacagcggggcgatatttatatcaatgcgttcaagtccggtagttggtccctgaaaataaccatggtcaaaagccagcatcacggttttacccgttttcggattaaatatccgcgataagcgtgactgcattccccaatccagcgcaccgcaacctttcagggtaaaagggatatttttttgcggttgatcggtacgaaaatctttaccatctttaatatcgtctaaatctgccataacttactccggttaagtaatgcacatcagaaatcgtatttgccgatattctctttgttgaatatcacgcgctccggtaacagtacgatgccattaccatccgcttcgtagtcatagccctggacgctgtttggcgagacttccacctgacctacgccctgaatatccagcttgtcgcccgttttcattgatccttttttcaataatgcatccgcgacataaactgaaattttgccttgctgaaccacatcccacaggccaaattctttcaccgtgccgcgttccacatatggacgcatcacgtttggcgtactgaatccgacaatcgcaactttgtcatttttcaggttttctgcggcttgtgcggcagcgggcagggcattggcatcgggggcgataatggcgtcgagatcgctatacgcttttaatattccttctgcggtttgtaatgatttagtggcatcgttatagccaaactgcgtagtgacaatttcccagccaggatgctctttggcgattttcgctttcgcttctttcacccactggttttggtccgtaacggtggggcttgagtagaaaaacgcgactttggctttgtctttattcacctgacgcgccgccatatccaccaacatacctcccaactgggcgggagttccctgattaatgtagtaagagcggcactccggtttagtatcagagtcccaggtcagcactctcacaccacgttgcatggcgcgtttcagtgccggacacaagccatcaggcgaaaccgcagaaacgataatggcgttataaccttgattgacgaagttattaatcaactgtacctgaccagaaacactgggttctgtcggcccgtcgtaggtcacatcaacgcccagctctttacccgcttgttgtgcgccgttgccaccgctggtaaaaaatcccacgccaaccagtttgggaataaatgcaatacgctctgcggcctgcacattcatagagattgcggcaatgccaagagcgctaagtaaggcgattttcttaaagcgatgaagtgtcatgaagatatcctttatggcaatgggttattggcccgacgcgccagccactctttaatttgctggcgatgcaggctaacggaacgacctacgacaacgacgataagtagcgcaccggaaagggcgctggacacctgatttggcactcctgccatttgcaaaccttgttgcaaatatcccactaataaaaccgcaatggcggtgccgataatggcaccggaaccaccataaatattggcaccgccaagcaccacggcggtgatggcgggcatcagaaacgacgcaccgagatcggaacgtgctgaaccaaaatacgacaccagcagcacagcggcgaccgcagacgccagccccgtcatggcatagagcgcacataaggtacggttaactggaatcgcgctataaagcgccannnnngggctttgcccaatcaaaaacacgttacgtccggcatgggttttatgcagccagagccagaaaacgaggagacatatcaggaagataatcagcggaacggggagccccaacacatccaggttagcgaaatctgtaaacgccatcgggaatccaccaataccttcgtaccccgtcgccccggccatcccggaaagcagcagggcgcttccggcaaacagatacagcgtgccaagcgtaatcaccagcgggttaactttggtatagataattaatccggcgttgatcagcccgcacaatgcgccgagcagtaaggtcaggagaatcgccagcggcatcggcacaccactttgaaacagtacgcccaatgcaatggcgcagaggccgatggtcgaaccaaacgaaatatcgatcccgccactgacaatcaccatcgtcagcggtagggcgacaatgccaatgcagataaagtcactggtgctgaacagcaacatattgagatctaacatccgcgggttaattgcaccaaatgagacaatctcaataacaagcagtgcggcaagagccagttcccaaccgtagcgaatacgcattatgcagcctcccgttttttacctgacgaagcgggtttaacggatggcggtggcgtcataaagcgggcatatttttgccgccgcagattaagttccagcgcacaacgcaggcgtccatcaaacaccagcaccgccagcagaaccagacccgcgataaaatcattccaccatgccggaatgcgcaacagcaccagtacgctatcgatctgcgtcaggaaccatgcgccgagtaccgcaccgatgatcgcaccggaaccgccgagcaaactaatgccgcccagcacgcaggctgcaattgctttcatctccagcccggtaccggtctggttggggataaaaccaatctgcgaagcaaacacaattcccgccagtgccgccatgcagccgttcaacgaaaatgccacaatgcgaatggcttccgtacgaacgcccagttgacgagcgccctgtaaattatcgcccgtggcataaaaactgcgtccaaacgctgtcttcgccagcagccaggccataaatgccaccagaattatcgttaaccaaccaattgctgaaacgccaagcagcagcggggcggagagctgtttcagttcggcgggtaacccttcaatccatttaccgccagtccacagcaacatgatgcctctgtacaaccctaacgtgccaagggtggcaacaatggcagggatctttagccacgcgaccaggacaccgttgaaaaatcccgcgagcaaaccaagcagtaaagtcgcgacacaggcaacaggtagtgaatatcctgcgttcagtaacatccccaacagcaccgcgcacattccggtaatcgaacccactgaaacatcaatattgcgcgtaagcattaccagcgtcgcgcccattgccagcaggatcaggatttgcgcgctgctataaaccatggtcagcgtttgcacacttaaatactggcggtcgagaaaaccgggtaatacaaacagcagcagcaccgccagcagtgccgtgatttcacggttgttctgaataaacttcagcatgccgcctcctgacgctgactatcgccgaaggcaacgcgcataatagtctcgacattaatatcgcgcccggtcagtgcagagtgggtaatttcgccctgatgcatcacatacacacgatctgccatcagttcgatctcttccagatcagaggagataagcagcacagccacattctgtgcggcgatgctgcgcaacagttggtagatatcattacgcgccgagacatccacgccgcgcgtcggctcatcgacaatcaatacttgcggcgaggcttccaggcatttggcaatcaggattttttgctggttaccaccggataatgtccgtgcagcttgttccggttggttatatttaatattcagcgcccgacgataaagttccagggtggcattatctttcgcggttttcgcccagaatccacgaaggttatgagtaagggcgcagacgttccaggccagcgaagcatcgagattcagtccggatgactggcgatcttccggcagataaaccagaccgcgcagtaaacgttctccagtggataatctattgatctctttatcattcagcataatgcgtccgccacgcaaagtacgtagaccatagagcgtctcggccagttctgtgcgtccggcacccaccagcccagccagacccagaatttctccggcatttagcgtcaggctgacattcctgaaaccttcgccagtcagattttccagtgtcagcaccgacgttcctgcggcatgttgtgggcggttgccaggtaactccagccataatttttggctggcagagagcgatttttcccgtaccgctggggtgatggcctgaataatgtcgtcggtagacagttcgctggttttgccgcttaaggcgatggttccgtcgcgcatcacgctaatccgatcggcaatctggcgaatttccggcagcttatgcgagataaaaacaatacccacgccagtagcaagcagctcttgcaagcgagtaaacaagcgttcggtttccgcaggggtaagcgaggcggtaggttcatcgaggatcagaatccgcgagtcgcgcatcagcccgcggaggatttccaccatttggcgatcggcgacatccagcgatcctgccagactatgcagatcaaactggcagcccagcgccgccagcaagttcttcattttctgcatggagagctgtttttttgccagcccaaacaggatgttttcttttatcgacaggcttgggaaaagcagcggttcctggggaacgagataaatacccagctgatgagcatgaactggcgttaatctggcgtagttgttgcccccaatctccagcgtaccgctatcagcaggggtaataccggcaataatcttcattaacgtcgatttaccggcaccattgccgccgagcagggcgtggacctccccctgatgcaacgtaaaatcgatgcctttcaggacattgacccctgaatactgtttataaaccgagcgggcgcaaagtagcggtaacgcgcgggtatcactcgtttgcatatttcccccgttcagttttgcaggtgagttttgaacaaatgtatttctgcttttaatttgttcataaccttaggtggacattgcacatatttccgacgaatagatcacaatttatactattttgattttcacggttgcgtttgttcatgctcgtagagtcaaactgtggttgccatcacagatataaatgcgcaagaactgaacaattgcattaaagatttaaatatgttcaaagtgaagaatgaattatgacaatcaacgattcggtaatttcagaacagggaatgtgtgaagaagaacaggtcgcgcggatcgcgtggttttactaccacgacgggctgacccagagtgagatcagcgatcgtctcggcctgacccgtttgaaagtgtcgcgattactggagaaagggcatcagtccggcatcattcgcgtgcagattaattctcgctttgaaggctgtctggaatatgaaacacaattacgtcgtcagttttcgctgcaacatgtccgggtgatccctgggcttgcggatgctgatgtcggcgggcgactggggataggcgcggcgcatatgttgatgagtttacttcaaccacaacagatgctggcgattggttttggcgaggcaaccatgaatacgctgcaacgcttaagtggttttatttcgtcacagcaaattcgcctggtcacgctctccggtggcgtcggttcttatatgacgggtatcggacagcttaatgcggcgtgcagtgtgaatattattccggctccgttgcgggcatcctccgctgacattgcccgtacgctaaaaaatgaaaattgtgtcaaagatgttctgttagccgcgcaagcagcggatgtggcgattgtcggcattggggccgttagtcaacaagacgacgcgacgatcattcgctccggttatatcagccagggcgaacagttaatgattggccgaaaaggggcggttggcgacattttaggstacttttttgatgcaaaaggtgacgttgtcacggacattaaaatacataacgagctgattggcttacctttaagcgcgctgaagaccatacccgtccgggttggcgtggcagggggagaaaataaagccgaagcaattgccgctgcaatgaaaggcggttatatcaacgcactggttaccgatcaggacacagcagcggcgattttacgtagttaaatttgcatgaccttattaccgggaatgatggagaacgtatagaggaacagacagaacgcataagccgaggataatctaatggctcgactctttaccccttcagaatcaaagtactacctgatggcgctggatgcaggcaccggaagtattcgggctgtgatattcgacctggaaggcaatcaaatagcagtgggacaggcggagtggcggcatctggcagtaccggacgttcctggttctatggaatttgatctcaacaaaaactggcaactggcgtgtgagtgtatgcgccaggcgctgcacaacgccggcatagccccggagtatatcgctgccgtttcggcatgttcgatgcgtgaaggcattgttttatataacaatgaaggaacaccgatctgggcctgcgccaatgtggatgccagagcggcgcgcgaagttagcgaacttaaagaactgcacaacaatacctttgaaaacgaagtttatcgcgcgaccggacaaacactggctttaagtgccatccccagattactttggctggcgcaccatcgttccgatatttaccgtcaggcatcaaccatcaccatgatcagcgactggctggcctatatgctcagcggcgaacttgcggtggatccctctaacgctggcaccacgggacttcttgatctaaccatccgtgactggaaacctgcattgctggatatggctggcctgcgtgccgatattctttctcctgtcaaagaaaccggcacattgctgggcgtggtaagttcacaagcggcggaactctgcggtctgaangtgggcactccggtggtcgttggaggaggcgacgtgcagcttggttgcctggggttaggcgttgtgcgtccggcacnnnnnnnnnnnnnnnnnnnnncattctggcagcaagttgtaaatttagccgcgccggtgacagacccagaaatgaacgtgcgcgttaatcctcatgttattcctggcatggtacaagctgaatctataagcttttttaccggactcaccatgcgctggttccgcgatgctttctgtgccgaagaaaaactgattgccgaacgtttaggcatcgacacctatacgctgctggaagagatggccagtcgggtgccgcctgggtcgtggggcgtaatgccgatcttctccgacagaatgcgctttaaaacctggtatcacgctgcgccttcctttattaatttgtccattgatccggataaatgtaacaaagcgacattgttccgtgcgctggaagaaaatgcggcgattgtatcagcgtgtaacttgcagcaaattgctgatttttcgactattcatccttcatcgttagtctttgcaggcggaggttcaaaagggaaattatggagtcaaattctcgctgatgtctcgggattacccgtcaatattccggtggtcaaagaagccactgcattaggatgtgccattgcagctggcgtcggtgccggaattttttcatcaatggcagaaaccggagaacgcctggttcgctgggaacggacgcacacaccagacccggaaaagcatgaactttatcaggattcacgcgataagtggcaggcagtttatcaggatcagctggggctggttgatcatggactgacgacgtcgttatggaaagcgcctgggttatagtttcattgacagccacatcatgatgaccgtggctgttagtttttgagtatagttattcttatttcccttcttttagagctggcttgttaaatgccagcttgcagattcatcgtttcatcaccagtactatattcaaggggaaattgctatttttcttaaagcattaagcataacccttattttataacgaatattcctaaagacattaatggatgcaaaaggggtttaataaacttcgatttttagcaattagtgctattctttgttaaatatgatgatgataattttcctactgaaagaaacagttttcttattaagcaacaataactcatagttcatttttaaataaaataagaactatgcaatttttaatctatcaattcgaaagtattagcaagttagccaaattgacactttcccacctccaactaacactcaatacagacctctgacaatttaataaatttcatttttaatgtctgacgactcatctctttcgtggctgtattgtttgtatttggagcgtttatatgaatagaatctatcgcgtgatatggaattgcactctacaggtatttcaggcctgctcggaattaactcgcagggtaggtaaaacatcaacggttaatttgcgaaagtcctctggactgacaacgaaattcagtagattgacgctgggtgttttgctggcactaagcggttcagtgtctggtgcgagtctggaagttgataatggtcagattaccaatattgatactgatgttgcttatgatgcctacctggttggctggtatggcactggagtgcttaatattttggctggcggtaatgcctccttaaccactattactaccagcgtcattggcggtaatgaggattcggagggtaccgttaatgttttgggtggcacctggcgattgtatgatagcggaaataatgcaaggcctttaaatgtgggtcaatccggaacggggacgctgaatattaaacagaagggtcacgtcgatggaggctatttaagattaggtactcaagctgcaggcgtcgggacggttaatgttgagggagaggactcggttttgacgaccgaattattcgaaatagggagttacggtacgggctcattaaatattacggataagggttacgtcacgagttcaatagtcgccattttaggatatcaagcgaacagtaatggtaaggttgtcgttgaaaagggtggcgagtggctaataaaaaataatgattcctcaattgaatttcaaattggtaatcaaggaactggggaggcgactattcgcgagggtgggctgattacggctgaaaatacgattatcggtggcaatgccaccggtgtcggaaccctgaatgtgcaggatcaagactctgtcatcacggtacgcagactctataatggatatttcggtaatggcgcagtcaatatttccaataatggactaattaataacaaagaatattcattggtgggcgttcaggacggttcccacggtgtcgtcaacgtgaccgataaagggcattggaatttcctcggaacgggcgaagctttccgctatatctatatcggtgatgctggcgncggtgaacttaatgtctcgcgtgaaggtaaagtagattcgggaattatcactgcggggatgaaagaaacaggcacaggcaaccttactgttaaggataagaactccgttatcactaatctcggaactaatcttggttatgacggccacggcgaaatgaatatcagtaatgaggggcttgttgtcagcaacggaggaagctctctcggttatggagaaaccggcgtcgggaaggttagcatcaccacgggggggatatgggaggtcaataagaatgtctataccaccattggtgttgcgggcgtcggaaacctcaatattagcgatggcggtaagttcgtatcgcaaaatattacttttnnnngcaataaagcaagcggtatcggcacactgaacctgatggatgcgacatcgtcgttcgatactgtgggtatcaatgtcggtaattttggtagcggtatcgtaaatgtcagtaatggtgccacccttaattcaacgggctatggatttatcggaggaaatgcctccggtaagggaatagttaatatttcaacggatagtctctggaatttaaagacgtcttctactaacgcccaattgctacaggtcggtgtattaggcacgggtgaactgaatattaccaccggaggtatagttaaagcgcgtgatacacagatagctctcaatgacaaaagtaagggcgacgtgagggtggatgggcagaactctcttcttgaaacattcaatatgtacgtagggacatctggtacgggtacgttaaccctgacgaatagcggcacgctgaatgtcgaaggtggagaagtttacttaggtgtttttgaacctgctgtaggaacgctaaacattggtgcagctcncggtgaggnggcggcagatgccggatttatcaccaacgcgacgaaagtagagtttggctctggcgaaggtgtttttgtctttaatcatactaataacagtgatgccggctaccaggtcgatatgctgattacaggtgacgataaagacggaaaagtgatccatgatgcaggccatacggtgttcaatgcagggaatacttatagcggtaaaacgctggtcaatgacggcctcctgaccattgcgtctcatacggcagatggggtaacgggcatggggtcgagtgaagtaaccattgcaagccccggtacgctcgacattctcgcatcaacgaacagtgcaggagattacacgctgaccaatgcgctcaaaggcgatggcttgatgcgagttcagctgtcatcctccgacaagatgtttggctttacacatgcaacagggactgaattcgccggtgttgcccaactgaaagacagtaccttcactctggaacgcgacaacaccgctgcgcttactcacgcgatgttgcagtctgacattgaaaataccacatcggtaaacgtgggagagcaatccattggtggactggccatgaatggcggtacgctcattttcgatacggatattcctgctgcgacgcttgcagagggatatatcagcgtcgatacgctggttgtcggcgcgagtgactacacctggaaaggccgtaactatcaggtaaacgggacgggcgacgtgcttatcgacgtgcctaaaccgtggaatgatcctatggcgaataaccctctgacgacgctcaatttgctggaacacgatgataaccatgtcggcgttcaactggtgaaggcgcaaacggttattgggtcgggtggctcattaacgttacgtgatttacagggcgacgaggtggaagcggacaaaacgttacacattgcgcaaaacggaacggtggtcgccganggtgattatggattccgcctcacgaccgcaccaggtgatggtttgtacgttaactatgggctgaaagcgctgaacatccatggagggcaaaagctgacgttagccgaacatggcggagcctatggcgcaacggccgatatgtcggcaaaaatcggtggtgaaggggatctggcaatcaatacggtgcgacaggtttcgctttccaacggtcagaacgactatcagggggcaacctacgttcagatggggacattacgtaccgatgcggatggcgcgctgggcaacacccgggaactgaacatcagcaacgcagccatcgtcgatcttaatggatcgacgcagacggtagagacattcaccgggcagatgggttcgactgttttgttcaaagaagggtcgctgacggtaaataaaggtgggatcagtcagggtgaactgacaggtggcggaaacctgaatgttacagggggaacgctggctgtcgaggggcttaatgcacgctacaatgcgttaaccagcgttagcccagatgcggaagtcagcctcgataatacgcaggggttaggcagaggaaatattgccaatgacggtctgttaacgctaaaaaacgtgactggcgaactgcgtaatagcataagcgggaagggtatcgtgagcgcaaccgccaggacagatgtagagctggatggcgataatagccgctttgtggggcaattcaacattgatacaggcagcgcgctcagcgtcaacgagcagaaaaacctgggtgatgcttccgttatcaataatggcctgctcaccatctccactgagcgtagctgggcgatgacgcacagtatcagcggtagcggtgatttgacaaaactgggtaccgggatcctgactcttaacaacgattcctcggcgtatcagggtacgacggatatcgtggggggngaaattgctttcggttccgactctgccattaatacggcaagtcaacacattaatatccataacagcggtgtgatgtcgggaaatgtcaccactgcaggtgatgtgaacgttatgtctggggggacactgcgtgtcgctaaaaccacaatcggcgaatcggcggcaacctggagaatggcggcacggttcaaatgaacagtgaaggaggaaaaccggggaatgtactgaccgttaacggcaactataccggaaacaatggcctgatgacgttcaacgcgacgctgggcggcgataattcacccaccgataagatgaacgtgaaaggcgatacccaagggaacactcgcgttcgggttgataacattggcggcgtcggtgcgcaaacggtcaacggtattgaactcattgaggttggcggtaattctgcaggtaatttcgcgctgaccaccggaactgtcgaagctggggcttacgtctacacnctggctaaagggaaggggaatgacgagaaaaactggtatctgaccagtaaatgggacggcgtaacgccagcggatacacccgatcccatcaataatccccctgttgtggatccggaaggcccatcagtttatcgcccggaggccggaagctatatcagcaacattgccgcagccaactcgctgtttagccatcgcttacacgaccgtctgggtgagccgcaatatacagattcactgcattctcaggattcagcaagcagtatgtggatgcgtcatgtcggggngcacgaacgttccagtgccggagacggccagctaaatactcaggctaaccgctatgtattgcagctaggcggcgatttggcgcagtggagtagcaacgcgcaggatcgctggcatcttggcgtgatggcaggctacgccaatcagcacagtaatactcagagtaatcgtgtgggttataaatcggatgggcgcatcagcggttacagcgctgggctgtacgcgacctggtatcagaacgatgcgaataagaccggcgcttatgttgacagctgggcgctgtataactggtttgataacagcgtcagttccgataaccgttctgctgacgactatgattctcgcggtgtgacggcctctgttgagggtgggtatacctttgaagcgggaacatgtagcggcagtgaagggacgctgaatacctggtacgtccagccacaggcgcaaatcacctggatgggtgtgaaagattctgaccatgcccggaaagacggaacgcgcattgaaacggaaggcgacggaaacgtgcaaacgcgacttggggtgaaaacctacctgaatagccatcaccagcgtgacgatggtaaacagcgtgagttccagccttacattgaagcgaactggatcaacaatagcaaagtctacgccgtgaagatgaatggtcaaaccgtaagccgtgatggtgcgcgaaatctcggtgaagtacgtaccggggttgaggcgaaagtaaataacaaccttagcctgtgggggaatgtcggtgtgcaactaggtgataaaggctatagcgatactcagggcatgcagggagtgaaatatagctggtaaacagtataagccgcatgtcgagatggcatgcggcttaatattgccaacttcaaaaggcttnnannnnnnnnnnnnnnnnnnnnatcgcggatatcgcagcgtttatcccgtacagcggataagatgtgtgtccagattgactttatcctcactaaaggataaaactgataatatccccttaagcggataaatttgctgtggacgtatgacatgatgagctttcagaagatctatagcccaacgcaattagcgaatgcaatgaaactggttcgccagcaaaatggctggacgcagagcgagctggcgaaaaaaatcggcattaagcaggcgacgatttccaatttcgaaaacaaccctgacaataccacgctcacgacattttttaagattttacagtcgcttgaactctcaatgacactatgcgacacgaaaaatgcctcgccagaatcaacagaacagcaagatctggagtggtaatgcctaaacttgtcacttggatgaacaaccagcgggtaggcgagttaacgaagttagccaacggcgcgcacacctttaagtatgcaccggagtggttagccagccgttatgccagaccgttgtcactttcgctgccattgcagagggggaatatcacctctgatgccgtatttaacttcttcgataacttgttacccgatagcccgattgtacgtgaccggatcgttaaacgttatcatgccaaatccagacaaccgtttgatttattgtcagaaatagggcgagacagcgttggtgccgtgacgttaatacccgaagacgaaaccgtaacgcgtccgataatggcatgggaaaagcttactgaagtcagacttgaagaagtattaacggcttataaagcagatatcccgctaggcatgattagagaagaaaatgactttcgcatctcggttgctggcgcacaggagaagacagcactgctcagaataggcaatgactggtgcattccgaaaggaataacgccgacgacgcacatcattaaattaccgattggggaaatcaggcagcccaatgcgacgctcgatctcagccaaagcgttgataatgagtattactgtctgctgctggcgaaagaacttgggttgaatgtcccggacgcagaaatcattaaagcgggaaatgtgcgcgcgttagcggtcgaacgttttgacaggcgttggaatgctgagcgaacggttttacttcgcttgccacaggaggatatgtgtcagacattcggtttaccttcatcggtgaaatatgaatcagatggaggcccaggcatcgcgcggatcatggcttttttgatggggtccagcgaggcgcttcgcgatcgttatgattttatgaaattccaggtcttccagtggttgattggcgcaacggatggccatgcaaaaaacttctccgtatttattcaggctggcggcagttatcgactcacgccattttacgacatcatttcagcatttccggtccttggcggtacgggaatacacatcagcgatctcaaactggcaatggggcttaacgcatccaaaggcaaaaaaacggcaatcgataaaatttatccgcgacattttttggcgacagcaaaggtgctgagattcccggaagtgcagatgcatgaaatcctgagtgactttgccagaatgattccggcagcactggataacgtgaagacttcattaccgacagattttccagagaacgtggtgacggcagttgaaaccaatgtgttgaggttgcacggtcggttaagccgagaatacggtattaagtaagagtaagatatggggtttggtcgttgttaatgagcaggacaatcatgaccgccaacgactagattctcccttggtttatattggtgcgcataatgtatattatgttaaatcgtatctgagtgatacgaagtgattttccggtagtcgttattcgttcaggattccagaacttaagcttctcctctttcataattggcctgtgcatgacggatataggctggctggtatgccgatttgccgtttgccgcatcttcccagcgttgaagactcaagctggcaaaccgcgtgcaaatgagcacgccctctttccatcaacacttcaggcagcttgcgggaatgagtccactccggtatcagaaatggctacgtctcaatgaagtcaggcgaacgatgctgaatgaacattacgatgtcaccacagcagcctatgctgtcggttacgaaagcttatcccatttccgacgggaatatttgcggatgtttggagagtcacctaagagagatattaccaggttaagaaagtctgtcggtcagctttaataaaccctgcacttatctgtttagagcaattcggtgttagttacaccaggcaaacattaactatagctaatgatttatagccatataaaccattagtagcccttgacctttcctgacacttcccttgttcgcaataatattctgtttagtcacggtttataaataacatgcataatgaaatcgtcatgttatttagcgacataaaatgtttttgcaaatactctcttcaacaagtgcagcaataaacttgttgtgattaggtgtccttgtgatttaaagatattatcgttcttcgtgaaatgtaataaccctggaaactatattctcagggcaacaaccaatcaagaatgattcttgttttataagcaataacagaatgacttaattgttaactctctttattcagctacttaaatataaattttggagaattatgaaactcaaacatgttggtatgattgtcgtttctgtgttggcgatgtcgtctgctgcggtaagcgcagccgagggtgatgaatcagtaacgaccactgttaatggcggtgttattcattttaaaggtgaagtggtaaatgccgcttgtgcgattgattccgaatcaatgaaccaaacggttgagctgggtcaggttcgttcttctcacctggctaaagcgggtgacctcagctccgccgttggcttcaatatcaagctgaatgattgtgataccaatgtttccagtaatgcagctgttgcattcctgggtactactgtcaccagtaatgacgatacgttagcgctgcagagttcagcggcaggctctgcccaaaatgtcggtattcaaattttggaccgtacgggtgaggtattaatacttgatggggccacttttagtgctaaaaccgacttgattgatggcacnaatatactaccattccaggctcgttatattgctctcgggcagtccgtagctggtactgcaaacgcagatgcgaccttcaaagttcaatatctataattcaatattaaggtggctatacggcatctgaaattaaaacagggtgtgtgtggcatggctacgcacacccgagcaattcaccaatgtgaatctcattattaatgatgagtggtttgtatttggagcgctatgaaaaatcacataatatctaaacgttcaataaacaacagtagttaaacttanngttnntnnnnatatttactttttagcaaggttttcctattaaaagagaaccaacctttattacaaacgcattaagtctggaaacccggtgactcgccaatgtattagcaacatttaccgattgtctgatgtaacggttttcccgcttatcctcttaacacatggagaatgcatcagatgcaaactacgcgtaccccctactctatttcctttatggcgacagtgttacttttattgctctttgcttgccatagcaccgttgccaacgcagctgtcgcactgggtgcgacgcgggtaatttatccggcaaaccagaaacaggttttattgcctgtcacgaataatgatcctgccagtgtctatctcattcagtcatggatagaaaatgctggtgaccaaaaagacacccagtttgtcattaccccacctcttttttccatgcaaggtaaaaaagagaatacgctgcggataatcaacgccactaatcatcagttacccggcgaccgtgaaagcctgttctgggttaatgttaaagctattcctgctatggaaaaagaccagaagaatgagaatacattacagctggcaattattagccgcataaaaatgttttatcggcccacgaacctggcaatggcacctgaagaagcgcctgcaatgcttcggtttcgtcgcagcggtagcaatctcactcttattaatccaacgccctacttcattaccgtaacaaatatgaaagcaggaaatagcaatctcccaaacaccatggtgccgccaaaaggtgaagtgtcggtggatatcccgcatgctgccaccggggatatcagttttcagacgatcaatgattacggcgcattaactccgcgtattaaggcaaccatgcagtaagccagtgacctaattaataataaactcaatcggaattaataatgacagcctttcgtgccgcatttaaggcatatcgtatgcatcaggtgttactactgcctcgctttgcacggcttaccattgcccttagcttagcaactgcggtatttcccgttgacgcagagtattattttaatccacggtttttaagcaatgatcttgctgaatctgtcgatttatccgcctttactaagggacgcgaggcaccacctggtacatatcgggtcgacatttatttgaacgacgaatttatgactagtcgggatattacttttattacagatgataataacgcagatctcatcccatgcctgagtacagatcttcttgtcagtcttggcataaaaaaatctgcgttattagacaataaggaacattcagcagaaaaacatgtgccggacaacagcgcatgcacaccacttcaggatcgtttggtcgacgcatcaactgagtttgatgttggtcagcaacatctgtcactctccgttccgcaaatttatgttggcagaatggctcgcggctatgtttctcctgatctgtgggaagaaggaataaatgctgggcttctaaactatagttttaatggtaattctattaataatcgtagtaaccataatgcaggaaaatccaactatgcatatttgaatttacagagtggcatcaacattggtagttggcgactacgcgataactcaacgtggagttataacagtgggagtagcaattcatctgacagcaataaatggcagcatatcaatacgtcggctgaacgtgacattattcccttacgctcacggttaacggtaggtgatagttataccgatggcgatatttttgatagtgtgaactttcgtggcctcaaaataaattcaacagaagcgatgttgcccgatagccaacatggtttcgctccggtgattcatggtattgcccgtggcaccgcacaagtgagtgtaaaacagaacggatacgatgtttatcagactactgttccacccggcccttttactattgatgatatcaactctgcggccaatggtggtgatctgcaagtaaccataaaagaggcagacggcagtattcagacattatatgttccttattcgtctgttccggttctccaacgtgctggatatacgcgttatgcgcttgccatgggggaatatcgtagtggaaataacctgcaaagctcccccaggttcatacaaggtagcttgatgcatggactggaaggaaactggacaccttatggcggaatgcaaattgcagaagattatcaggccttcaaccttggtattggtaaagatttaggactttttggtgccttttctttcgatatcacgcaggccaatacgacacttgcagatggcacccgtcacagcgggcaatcggttaaatccgtctacagcaaatccttctaccagacaggaaccaatatccaggtcgcaggatatcgctattctacgcaaggtttttataacttatccgacagtgcctacagtcgaatgagtggttacaccgtcaagcctcctaccggagacagcaatgagcagacacaatttattgattattttaatctgttctacagtaagcgtggtcaggaacaaataagcatctctcagcagcttggaaattacggtacgacatttttcagtgccagtcgccaaagttactggaacacgtcacgcagcgaccagcaaatatcatttggattaaatttgccgtttggtgatattacgacttcgctgaattacagctattccaataatatatggcaaaacgatcgggatcatttactcgcttttacgcttaatgttcccttcagtcattggatgcgtacagacagtcagtcggcatttcgtaattcaaacgccagttacagtatgtcaaacgatttgaaaggcggcatgaccaatctatcgggggtttatggcactctgctgccggataataacctgaattatagcgttcaggtcggtaacacccacggaggtaatacatcgtctggcaccagtggttacagtactcttaattatcgtggagcttacggcaatactaatgtcggttacagtcggagtggtgacagcagccagatttattacggaatgagtggtgggattattgctcatgctgatggcatcacctttggacagccgctgggcgacacaatggttctggttaaggctcctggcgctgataatgtcaaaatagagaaccagaccggaattcataccgactggcgtggctatgccatattaccatttgcgacagaatatagagaaaatcgtgtcgctcttaacgcgaattcccttgcagataatgttgaactggatgaaaccgtggtcactgtcatcccaactcacggtgctattgccagagcaacatttaatgcacaaatcggcgggaaagtattaatgacgttgaagtacggtaataaaagcgttccattcggtgcaattgtcactcacggagagaataaaaatggcagcattgtcgcggaaaacggtcaggtttatctgactggacttccacagtcagggaaattacaggtttcatggggcaatgataaaaactcaaactgtattgtcgattacaagcttcctgaagtctctcctggaaccttgctgaaccagcagacagcaatctgtcgctaaggaacaatagattatgaaatacaataacattattttcctcggtttatgtctggggttaaccacctattctgctttatccgcagatagcgttattaanannnncgggcgcgtcctcgattatggctgcacagtctcatcggattcgcttaattttaccgtagatctccaaaaaaacagtgccagacaatttccaacgaccggtagcacaagtccagccgtcccttttcagattacgttaagtgaatgcagcaaagggacaacgggggttcgggttgcatttaacggtattgaggacgcagaaaataatactctgttgaaactggatgagggaagcaatacggcctccggtttaggtatagaaatactggacggaaatatgcgtccggtgaaactgaatgaccttcatgccgggatgcagtggatcccactggtaccagaacagaacaatattttgccttactccgctcgtctgaagtcaactcagaagtccgtcaatccgggactggtgagggcttcggcaacctttacccttgaatttcaataatcagagtcagatatgaaaagacttcacaagaggttcctcttagctacgttttgcgcgttattcacagcaactctccaggccgccgatgtcactatcactgttaatggtcgggtagtcgctaaaccctgcactattcaaaccaaagaagctaacgttaatctcggggatctttatacgcgcaatctgcaacaacctggttctgcatctggctggcacaatattactttgtcattaaccgattgtccggctgaaacaagtgcagtgacggcaatcgtgacaggttcaactgacaatacgggttattacaaaaatgaaggtactgccgaaaatattcagatagagcttagggatgaccaggatgcgacgttaaaaaatggcgatagcaaaacggttattgttgatgagatcactcgtaatgcacagtttccacttaaggcaagagctatcacggtgaatggaaacgcaagtcagggaacgatcgaggcgctaatcaatgtgatctacacctggcaataacgtcgattcgattttcttagccttctttttaaatcaattttttaaccttaggatatatcatgggtaaaacaatcagtataaaggtcctgttcggtatttatcttctattaatggcaggcaaagtttttgccttcagttgtaatgtcgatggcgggtcaagtattggagctggtacaacctctgtttatgttaatctcgaccctgtaatacagccgggccagaatctggttgtagacttgtctcagcatataagttgctggaatgattacggcggctggtacgacactgatcatataaacctggtacaaggctcagctttcgcaggctctctacagtcatataaaggatcgctgtactggaataatgtgacctaccccttcccgttgacgacaaataccaacgtattggatattggtgataagacaccgatgccattaccgttaaaactctatattaccccagtcggggcggccggtggagttgtcataaaagccggggaagttattgcccgtattcatatgtataaaattgccacgttaggaagcggaaatccgcgtaattttacgtggaatattatttcaaataacagtgttgttatgccaacaggcggctgcactgttgatagtcgtaatgtcaccgtgaatctcccggactttcctggaagcgcagaaatcccccttggcgtatattgctcaagcgaacaaaagctctcattttatctttcgggtactaccactgacagtgctagacaagtgtttgctaacacagcaccagatgcaacaaaagcatcgggagtgggtgtctctctgatgcgtaatggaaaaatactggctacgggagaaaatgtctccctggggacagtaaataaaagcaaagtacctctgggtttaagcgcaacctatggacaaacagggaacaaagtttcagccggaaccgtccagtcagtcattggtgtcacttttatctatgaataattgtgattttgaccttagtctatgcgctccattcacgaaaattgcgcggataattattttgtgaaggctattatcctacacttgtaagaaaatccgcgcacaattgaagccagagtcttattttttnnnnnnnnnnnnatnttaatttaaacactatgagagatgatgcttaccttatcgtatttaatctattgtttaacaataatagattaaaaatagaaagagagtagtcccctactcttatatatccatgttggcgataatccctttgtatgtactgtgcatcatcgctattacaaatcctaataattcatttccacacaggataagtagatgaagaaaaaaattgaatcctaccagggtgctgccggtggttggggtgctgttaaatccgtagcgaatgcagtacgtaagcagatggatatacgccaggatgttattgccatgtttgacatgaataagccagagggctttgactgtccgggttgtgcatggccagatcctaagcacagtgcgtcattcgacatttgtgaaaacggcgcaaaagcaatcgcctgggaagtcacggataagcaggtaaatgcctctttctttgctcagaatacggttcaatcattacttacctggggagatcacgagcttgaggctgcgggacgtctcactcagcctttgaaatatgatgctgtcagcgactgttacaagccattaagctggcaacaagctttcgacgaaattggcgcacgccttcaaagctatagtgatcccaatcaggttgaattctatacttcgggccgcacttccaatgaagctgcctttctttatcagctttttgcccgtgaatacgggagcaataactttcccgactgctccaacatgtgccatgaaccgacaagcgtgggtttggcagcgagtatcggtgtaggtaaagggaccgtgttgctggaagactttgagaagtgcgatttagtcatttgcattgggcataaccctggtacaaaccaccctcgcatgctgacttcgttgcgcgctttagtgaaacggggagcgaaaatgatcgccatcaatcctctacaggaacgtggcctggagcgatttaccgcaccgcaaaacccgtttgaaatgctgacgaactctgagactcagttggccagtgcctactataacgtgcgcattggtggtgatatggcgttgctcaaggggatgatgcgcctgttaattgagcgcgatgatgctgcaagcgccgcaggtcggccctcattgctggatgacgaatttattcaaacgcataccgtcggctttgacgagctacgccgtgacgtgctcaattccgagtggaaagatatcgaacgtatttctggactaagtcagacacaaatcgccgaactggctgatgcatatgccgctgccgaacgaaccattatctgttacggaatggggatcactcagcacgaacatggtacccagaatgtacagcaactggtcaatctgctgttgatgaaaggtaacattggcaagcctggtgcgggtatctgcccactacgtggccactctaatgtacagggcgaccgaaccgtcggtatcaccgagaaaccgtctgtagagtttctggctcgcctgggtgagcgctatggcttcaccccacctcatgtacctggacatgctgcaattgccagcatgcaagcaatatgtacggggcaggctcgagcattgatctgcatggggggcaactttgcactggcaatgccagatcgggaagcgagcgctgtaccgttaacgcaattagatttggcggtacacgtagccactaagcttaaccgctctcatctgctgaccgcacggcatagctatattctgccggttctgggacgtagcgagattgacatgcaaaaaagcggtgcgcaggcggtaaccgttgaggattcaatgtcgatgattcatgcctcgcgtggcgtgttaaaacccgccggtgtaatgctgaaatcagagtgtgctgtggtcgcgggaatcgcgcaggcaacactaccccagagcgtggtagcctgggagtatctggtggaagattatgatcgcattcgcaatgacattgaagctgtgctgccagagttcgccgnctataaccaacgcatccgtcatcccggtggttttcacctgataaatgcagctgctgaaaggcgctggatgacgccgtcaggtaaggctaatttcattaccagcaaagggctgttagaagatccctcttcagcgtttaacagtaagctggtcatggcgacagtacncagccacgatcagtacaacacgacgatttatggtatggatgatcgctatcgaggggtattcggtcaacgagatgtggtctttatgagtgctaaacaagctaaaatttgccgtgtaaaaaacggcgaangagttaatcttattgcgcttacgccagacggtaagcgcagctcacgccgcatggatagattaaaagtggtcatttaccctatggctgaccgctcactggtgacctattttccagaatcgaatcacatgctaacacttgataaccacgatccattaagtggcattcctggctataaaagtattccggttgaattagaaccatcaaattaatgcctcttctcatttcttctgctgtcatccgcacagcagaagaattcctcattgactattatcgcgcaatttgctcacatggattaaattaaactacatactataagatataaacttctgccnacagctgtaagaaactccgctcagtactgaagcaccagtcctatttcctcttttctcaagcctgttatattaagcatactgattaacgatttttaacgttatccgctaaataaacatatttgaaatgcatgcgaccacagtgaaaaacaaaatcacgcaaagagacaactataaagaaatcatgtctgtaattgtggttatcttattactgacccttacgttgatagccattttttcggcaattgatcagctgggtatttcagaaatgggtcgcattgcaagagatcttacacatttcattgtcaatagtttgcaagactgaaaataaacagcaaattataaatatgaaatgttaaaaaagtatcgataaaactttattgttttaaggagataaaatgtcgctcgtttgttctgttatatttattcatcatgccttcaacgctaacattttagataaagattacgccttctctgacggcgagatcctgatggtagataacgctgttcgtacgcattttgaaccttatgagcggcattttaaagaaatcggatttaatgaaaataccattaaaaaatatctacaatgcactaacatccagacagtgacgatgcctgttcctgcgaagtttttacgtgcttcgaatgtaccgactggattgcttaatgaaatgattgcttatctcaactcggaagaacgcaatcatcataatttttcagaacttttgcttttttcttgcctgtctatttttgccacatgcaaaggtttcattacactattaactaacggtgtgctatccgtttcggggaaagtgagaaatattgtcaacatgaagctggcgcacccatggaagctgaaagatatttgtgactgcctgtacatcagtgaaagcctgttgaagaaaaaactaaagcaagagcaaacgacattctcacagattcttttagatgccagaatgcagcacgcaaaaaatttgatacgcgtagaaggttcagtcaataaaattgccgaacaatgtggttatgccagtacatcttattttatttatgcgttccgcaaacatttcggcaacagtccaaagagagtttctaaggagtaccgttgtcaaaggcacacgggtatgaatacgggcaacacgatgaatgctttagctatttgattatttgctaacgagtagtcaaccacgcaccctacgtaaaaattaaaaatggggcagtcattccctgccccgcgttgtttttaggcgatatatttattgaaataaataagtgacattcatcacatatttatgcatttgcataacttgttgcatgattatttatgatctcaattcggcattttgttagtaaaatacaataatttattaaatatcaatagattaattgtttatcgtcgagaaattacttagtagaacaaaaagtaatgtcaacgctttatggactgttatttccctttttttagctaaatctgctatctctttatgtgactaacttcacttacatccacttatttctcttcgtaaaattactttggaattaagtacaataagaagaggaacatttatgaagtctgcattaaagaaaagtgtcgtaagtacctcgatatctttgatactggcatctggtatggctgcatttgctgctcatgcggcagatgatgtaaagctgaaagcaaccaaaacaaacgttgctttctcagactttacgccgactgaatacagtaccaaaggaaagccaaatattatcgtactgaccatggatgatcttggttatggacaacttccttttgataagggatcttttgacccaaaaacaatggaaaatcgtgaagttgtcgatacctacaaaatagggatagataaagccattgaagctgcgcaanaatcaacgccgacgctcctttcattaatggatgaaggcgtacgttttactaacggctatgtggcgcacggtgtttccggcccctcccgcgccgcaataatgaccggtcgagcgcccgcccgctttggtgtctattccaatactgatgctcaggatggtattccgctaacagaaactttcttgcctgaattattccagaatcatggttattacactgcagcagtaggtaaatggcacttgtcaaaaatcagtaatgtgccggtaccggaagataaacaaacacgtgactatcatgacaacttcaccacattttctgcggaagaatggcaaccgcaaaaccgtggctttgattactttatgggattccacgctgcaggaacggcatattacaactccccttcactgttcaagaatcgtgaacgtgtccccgcaaaaggttatatcagcgatcagttaaccgatgaggcaattggcgttgttgatcgtgccaaaacacttgaccagccttttatgctttacctggcttataatgctccgcacctgccaaatgataatcctgcaccggagcaatatcagaagcaatttaataccggtagtcaaacagcagataactactacgcttccgtttattctgttgatcagggtgtaaaacgcattctcgaacaactgaagaaaaacggacagtatgacaatacaattattctctttacctccgataatggtgcggttatcgatggtcctctgccgctgaacggggcgcaaaaaggctataagagtcanacctatcctggcggtactcacaccccaatgtttatgtggtggaaaggaaaacttcaacccggtaattatgacaagctgatttccgcaatggatttctacccgacagctcttgatgcagccgatatcagcattccaaaagaccttaagctggatggcgtttccttgctgccctggttgcaagataagaaacaaggcgagccacataaaaatctgacctggataacctcttattctcactggtttgatgaggaaaatattccattctgggataactaccacaaatttgtccgtcatcagtcagacgattacccgcataaccccaacactgaggacttaagccaattctcttatacggtgagaaataacgattattcgcttgtctatacagtagaaaacaatcagttaggtctctacaaactgacggatctacagcaaaaagataaccttgccgccgccaatccgcaggtcgttaaagagatgcaaggcgtggtaagagagtttatcgacagcagccagccaccgcttagcgaggtaaatcaggagaagtttaacaatatcaagaaagcactaagcgaagcgaaataactaaaccttcatgcggcgnntttttccgccgccttattgagcgagatagcgatgcacgttacagccaagccctccagttttcaatgtaatctcaaatgtgattactgtttttaccttgaaaaagagtcgcagtttactcatgaaaaatggatggatgacagcactctgaaagagttcatcaaacaatatatcgcagcgtctggcaatcaggtctattttacctggcaaggcggtgaacccactctggctggcctggattttttccgtaaagttattcactatcaacaacgctatgcaggccaaaaacgtattttnnnngcattacaaacgaatggcattttattgaataatgaatggtgtgcctttctcaaagaacatgagtttctggttggtatctcgatcgatggaccccaggagctacatgaccgttacagacgcagtaattcaggtaacggtacttttgcaaaagtgatagcagccatcgagcgtctgaaatcatatcaagtagagtttaatacgttaaccgtcattaataacgttaatgtccattaccctcttgaggtttatcattttttaaaatctatcggcagtaaacatatgcaatttatcgaattgctcgaaaccgggacgccgaatattgatttcagtggtcatagtgagaacacattccgtatcattgatttttctgtgcctcccacggcttatggcaagtttatgtcaaccatttttatgcaatgggttaaaaacgatgtgggtgaaattttcatccgtcagtttgaaagctttgtcagccgttttttggggaatgggcataccagttgtattttccaggagtcctgcaaggataatctggttgttgaaagtaatggagatatttacgaatgcgatcattttgtctatccacagtacaaacttggaaacattaataaatctgaacttaaaacgatgaacagtgtacaactgacagcgcaaaaaaaacggatttcagcgaaatgtcagcaatgtgcatataaacctatctgcaatggcggttgccctaagcatcgtattactaaagtaaacgatgagactgtttcctatttttgcgaaggttataaaatccttttttcaaccatggtaccttatatgaacgccatggtggagttagccaggaacagagtaccgctttaccacattatggatgttgcaaaacaaatggagaataattaataacgctctcttttagctccattcttagcctccttcttatgaccttaacaaggcacccgacataaattcctgtcgggtgtttcgtcatcatcatcttcccttgcgaaaatcttggcttacgtggtatgcgtcagggcattagcaatacccttgattatcaatagcataaccataaccactgaaaattaaaaatttctatatatttcatattgttaaatgatacttaaataaatttcatcagtaaatcattgccatagataatcattggatggcagaatcaattttcgctaatgataaccattcccattacgttttgtatgttgatagcaaagtatctctgtctgctgaagcccttttggctgcgtaagaataataaaacttcagtgttgttaatcattattatcctcgccatgatccttggcgtggttaaaattcaggtctggttaaacgactggaataatgattttttcaatgcgctaagccagaaagaaaccgataagctttggcagcttgtcctttggttccctgccctgctggggatctttgtattaatatccgtaaacaaaacatggttaattaaactactgactattcgctggcgcgaatggttaacagattactaccttaatcgctggtttgcagataaaaactactacttcacgcagatctacggcgagcataaaaatacagataaccctgaccaacgtatcgctgaagacattctcttactgatcagcaaaacgctcagtctttcatttggcttcatccagtcacttagcatgctgatcacctttaccgttattctttggcaaagcgcgggtacgctctcattcactgttggtggaacagaatggaatatccaggggtatatggtctataccgttgtgctcattgtgatcggtggaactttatttacccataaggtgggtaaacgtattcgtccgcttaatgtggaaaaacaacgtagcgaagcgacatttcgaactaatcttgtgcagcataataagcaggcagaactgattgcgctaagcaatgctgagtctctacaacgccaggagttgagcgacaattttcataccattaaagagaactggcatcgtttaatgaatcgtcagcggtggcttgattactggcagaatatttattcgcgctcgcttagcgttcttccctactttctgttattgccgcagtttattagcgggcagatcaatctgggcggactgatgaaatcgcgccaggcatttatgctggtatcgaacaatctaagctggtttatttataaatatgatgaacttgctgaactggctgcggttatcgatcgcttgtatgagttccatcaactcaccgaacagcgccctacgaataagcctaaaaattgccaacatgcggtacaagtggctgacgcgagtattcgtactcctgataataagatcatattagagaacctgaactttcatgtttcgccaggcaaatggctattactgaaaggttactctggtgcgggaaaaaccacactgcttaaaacattatcccactgctggccgtggtttaaaggtgatatttcttctcctgccgacngttggtatgtgtcacaaacaccgttnatcaaaaccggcttactgaaagagattatttgtaaagcacttcccctgcccgtagacgataaatcattgagcgaagtactgcatcaggttggtcttgggaaattggctgcgcgtattcatgaccacgatcgctggggagatattctttccagcggcgaaaaacaacgtatcgccctggcacgattaattttacgacgtccgaaatggatatttcttgacgaaactacctctcatcttgaggaacaagaggctatccgcttactgcgtctagtgcgtgaaaaactacccacaagcggcgtcattatggttacacatcaacccggtgtctggaacctggccgatgatatttgtgacattagcgcggttnnnnaaaaacaataaaagccctgctgtacggagatataaataaatgaagcgagttcttattcctggcgtcattttatgtggcgctgatgtggcgcaggccgtcgatgacaaaaacatgtacatgcatttttttgaagagatgacggtctatgctcctgtccctgtacccgtaaacggcaacacgcattacaccagtgaaagcatcgagcgtttaccgaccgggaatggcaatatcagcgatctgctgagaaccaaccctgcggtacgcatggattcaacgcaaagtacctcgttgaaccagggagatattcgcccggagaaaatctctattcacggtgcgtcgccctatcagaatgcctatttgattgacggtattagtgccactaataacctgaacccagcgaatgagtccgatgccagtagtgcaaccaatattagcgggatgtcacaggggtattatcttgatgtcagcttactggacaatgtgacgctttatgacagttttgtgccggttgaattcggtcgcttcaatggcggggtaattgatgcaaagttcaaacgcttcaacgctgatgatagcagcgtgaaactgggttatcgcactacgcgttcggactggttaacatcgcatatcaatgagaataacaagagcgcatttaatcaaggctcttcaggaagtacttattactccccagattttaaaaagaacttttataccttgtcgtttaatcaggaactcgctgataactttggcgttaccgccggtttatcgcgccgccagtctgatatcacccgcgcggattatgtttcgaatgacggcattgtcgccggtcgggcacagtataaaaacgttatcgatactgcattgagcaaatttacctggtttgccagcgaccgctttacccacgatttaaccttaaaatataccggctccagccgtgattataataccagcaccttcccgcagtctgatcgcgaaatgggtaataaatcctatggtatggcatgggatatggatacgcagctcgcatgggccaaactacgtaccaccgttggttgggatcatattagtgattatacccgtcacgatcatgacatctggtacaccgaactttcatgtacatatggtgatattacagggcgttgcacccgtggcggattaggacacatttcccaggctgtagataattacaccttcaaaacacgcctggactggcaaaaattcgccgtgggtaatgtttcgcatcaaccctacttcggcgcggaatacatctattccgatgcgtggactgaacgccataaccagtctgaatcctatgtgattaatgctgccggaaagaaaactaaccataccatttaccataaaggtaaaggcagcctgggaattgacaactacacactgtatatggcggatcgcattagctggcgtaatgtgtcattaatgcccggcgtgcggtatgactatgacaactatctgtcaaaccacaatatctccccgcgctttatgacggaatgggatatttttgctgatcaaacctcaatgattacagcaggttataaccgttactatggcgggaatattcttgatatgggattacgtgatatccgcaatagctggacggaatcggtatcaggtaataaaaccctgacgcgttatcaggatttgaaaacgccttataacgatgaactggcaatgggattgcagcaaaaaatcggtaagaacgttattgcgcgcgcaaactatgtttaccgtgaagcgcatgatcaaatcagcaaaagcagtcgtaccgacagcgcgactaaaaccaccattactgaatataacaacgacggcaaaaccaaaacgcattcgttcaacctcagttttgaactggccgaacccctgcatatcagccaggtagatattaacccgcaaattgtctttagctatatcaagagcaagggcaacttgtcgttaaacaatggttatgaggagagcaataccggtgataaccaggtggtttataacggtaatcttgtctcttacgatagcgttccagtggcagattttaataacccattaaagatctccttaaacatggatttcacgcatcaaccgagcgggttggtgtgggcgaatacgctggcctggcaagaagcgcgtaaagctcgcattatcctgggtaagacaaatgcgcaatacatcagcgaatattcagattacaagcagtatgttgacgaaaaactggatagcagcctgacctgggacacccgcttgtcctggacgccacaatttctgaaacaacaaaacctgacgatcagtgccgatattctcaatgtactggatagcaaaaccgcggttgatacaacgaataccggtgtggcgacctacgccagtggccgtactttctggcttgatgtcagcatgaaattttaatagttcggattttacttaaccgggtaaattcgcccggttttcgcatggagataattatgagaaacctctgtttcttactgacgttagtggcaactctgttgctccccgggcggctgattgccgccgccttaccgcaggatgaaaagttaattaccgggcaactggacaatggcttgcgatatatgatttatccgcatgctcatccaaaggatcaggtaaatttntggctgcaaattcataccggttcattgcaggaagaagacaatgagcgcggcgtggctcattttgtagaacatatgatgtttaacggcacaaaaacatggccgggtaataaagtcatcgaaacatttgagtcaatgggcctgcgttttggtcgcgatgttaatgcctataccagctatgacgaaacggtgtatcaggtgagtttgccaactacgcagaaacaaaatctgcaacaagtgatggcaatcttcagtgaatggagtaatgccgcaacctttgaaaaactcgaagtagacgctgaacgcggcgtaattactgaggaatggcgtgcccatcaggatgcgaaatggcgcacctctcagnngcgccgccctttcctgntggcaaatacccgtaatttagaccgtgaacctatcggcctgatggatactgtcgccacggtcacaccggcacaattgctccaattttatcaacgctggtatcaaccaaataatatgacctttatcgtggttggcgatatcgacagtaaagaagcgctggcgctgataaaggataatttaagtaagcttccggctaacaaagcagctgaaaatcgcgtctggccgacaaaagccgaaaaccacctgcgctttaatatcattaatgataaagaaaaccgggtgaacggcatcgcactctattatcgcctgccaatggtacaagtgaacgatgagcaaagctttatcgaacaagctgaatggagcatgttagttcagctgttcaatcaacgtctgcaggaacgtatacagtcgggcgagttgaagactatttctggcggcactgcgcgcagcgttaaaattgcacccgattatcagtcgctgtttttccgtgtaaatgcacgagacgataatatgcaggatgctgcgaatgcattaatggcagagttggcaaccattgatcagcatggtttttctgctgaagaactcgatgatgtcaaatctacccgcctcacctggctgaaaaatgcggttgatcagcaagctgaacgtgatttacgtatgctgaccagtcgcctggcatccagctcattaaataatacgccgttcttgtcgccggaagagacatatcaactttcgaaacgtctgtggcagcaaattaccgtgcaaagtctggcggaaaaatggcagcagttaagaaagaaccaggacgcattttgggagcaaatggtaaacaatgaggttgccgccaaaaaagcattgtctcctgcggctatcctggcgctggaaaaggagtacgccaacaaaaagctggcggcttacatcttcccaggcagaaatttatcgttaacagtagacgctgacccacaggcggaaattagcagcaaagaaacgctggctgagaatctgacatcattaacactttccaatggtgcaagggttattctggcaaaatccgcgggtgaagagcaaaagctacaaattattgccgtatcgaataaaggcgatttaagtttccctgcgcagcaaaaatcacttatcgcgctggcaaataaagcagttagcggaagcggcgttggcgaactctcctcttccagcctgaaacgctggagtgcggaaaactcggtaaccatgagcagtaaagtcagtggcatgaatacgttgctctccgttagcgcgcggactaataaccctgaacctggttttcagttgattaaccagcgaatcacccacagcacgattaacgacaatatttgggcatcgctacaaaatgctcaaattcaggcgttgaaaacgctcgaccagcgtccagcggagaaattcgcccagcagatgtatgagacgcgctatgctgatgaccgcacgaaattactgcaagaaaatcagattgcacagtttactgccgcagatgcgctggctgccgatcgccagttgttttcatctccagcggatatcacgtttgtcattgtcggtaatgtcgcagaagacaaactcgtggcgttaattacgcgttacttaggatcaatcaaacactctgattcgccattagccgcaggtaaaccattaactcgcgcgacggacaacgcatcggttactgtaaaggaacaaaatgaacctgtggcacaggtttcacagtggaagcgttatgattcccggacacctgttaatctggcgacgcgtatggcgctcgatgcttttaacgtcgcactggcaaaagatctacgcgttaatattcgtgaacaggcatctggggcatacagcgtttcttctcgcctctcggttgatcctcaggctaaagatatcagtcatttgctggcttttacttgtcaaccagaacgacatgatgaactgttaacgttagcgaatgaagtgatggttaagcgtttgactaaagggatcagtgagcaagaactgaacgaataccagcaaaacgttcagcgcagcctcgatatccaacagcgtagcgttcaacaattagcgaacactattgtaaatagtcttattcaatatgacgatcctgcagcatggactgagcaggagcaattgttgaaacaaatgacggtagagaatgttaacactgccgttaaacaatatctttctcatccggtaaatacttataccggagtattattgccaaaataataacagccccgtcaacacatcgttggcggggattttagcaatattcgctatttttatgtaataattttataaatgcgttcaaaataataaccgcgtactaatagtgatattttaaggtctgatttttacgtgataattcaggaggcacagaatacgcataaaaataacagcataaaacaccttactaccacccaagaactccctactatattgtttttnnannnnaaatattattcatgcaatatctcaccataaataacattaggattttgttatttaaacacgagtcctttgcacttgcttactttatcgataaatcctacttttttaatgcgatccaatcattttaaggagtttaaaatggataagaagcaagtaacggatttaaggtcggaactactcgattcacgttttggtgcgaagtctatttccactatcgcagaatcaaaacgttttccgctgcacgaaatgcgcgacgatgtcgcatttcagattatcaatgacgaattatatcttgatggcaacgctcgtcagaacctggccactttctgccagacctgggacgacgaaaacgtccacaagttgatggatttatccattaacaaaaactggatcgacaaagaagaatatccgcaatctgcagccatcgacctgcgttgcgtaaatatggttgccgatctgtggcatgcgcctgcgccgaaaaatggtcaggccgttggcaccaacaccattggttcttccgaggcctgtatgctcggcgggatggcgatgaaatggcgttggcgcaagcgtatggaagctgcaggcaaaccaacggataaaccaaacctggtgtgcggcccggtgcaaatctgctggcataaattcgcccgctactgggatgtggagctgcgtgagatccctatgcgccccggtcagttgtttatggatccgaaacgcatgattgaagcctgcgacgaaaataccatcggcgtggtgccgactttcggcgtgacctacaccggtaactatgagttcccgcaaccgctgcacgatgcgctggataaattccaggccgacaccggtatcgacatcgacatgcacatcgacgccgccagtggtggcttcctggcaccgttcgtcgccccggatatcgtctgggacttccgcctgccgcgtgtgaaatcgatcagtgcttcaggccacaaattcggtctggctccgctgggctgcggctgggttatctggcgtgatgaagaagcgctgccgcaggaactggtgttcaacgttgactacctcggtggtcagattggtactttcgccatcaacttctcccgcccggcgggtcaggtaattgcacagtactatgaattcctgcgcctcggtcgtgaaggctataccaaagtacagaacgcctcttaccaggttgccgcttatctggcggatgaaatcgccaaactggggccgtatgagttcatctgtaccggtcgcccggacgaaggcattccggcggtttgcttcaaactgaaagatggtgaagatccgggatacaccctgtatgacctctctgaacgtctgcgtctgcgcggctggcaggttccggccttcactctcggcggtgaagccaccgacatcgtggtgatgcgcattatgtgtcgtcgcggcttcgaaatggactttgctgaactgttgctggaagactacaaagcctccctgaaatatctcagtgatcacccgaaactgcagggtattgcccaacagaacagctttaaacatacctgataacgtttaacggtaacggtgtcccgaaacgaacccgtttcgggacaatttccaaagtctgttcactggcattagcaacggaaaatattgttctgaatacgcttcagaacaaaacaggtgcggttccgacaggaataccgttttagggggataatatggctacatcagtacagacaggtaaagctaagcagctcacattactcggcttttttgccataacggcatcgatggtaatggctgtttatgaataccctaccttcgcaacatcgggcttttcattagtcttcttcctgctattaggcgggattttatggtttattcccgtgggactttgtgctgcggaaatggccaccgtcgacggctgggaagaaggtggtgtcttcgcctgggtatcaaatactctggggccgagatggggatttgcagcgatctcatttggctatctgcaaatcgccattggttttattccgatgctctatttcgtgttaggggcactctcctacatcctgaaatggccagcgctgaatgaagaccccattaccaaaactattgcagcactcatcattctttgggcgctggcattaacgcagtttggtggcacgaaatacacggcgcgaattgctaaagttggcttcttcgccggtatcctgttacctgcatttattttgattgcattagcggctatttatctgcactccggtgcccccgttgctatcgaaatggattcgaagaccttcttccctgacttctctaaagtgggcaccctggttgtatttgttgccttcattttgagttatatgggcgtagaagcttccgcaacccacgtcaatgaaatgagtaacccagggcgcgactatccactggctatgttactgctgatggtggcggcaatctgcttaagctctgttggcggtttgtctattgcgatggtcattccgggtaatgaaatcaacctctccgcaggggtaatgcaaacctttaccgttctgatgtcccatgtggcaccggaaattgagtggacggttcgcgtgatctccgcactgctgttgctgggtgttctggcggaaatcgcctcctggattgttggtccttctcgcgggatgtatgtcacagcgcagaaaaacctgctgccagcggcattcgctaaaatgaacaaaaatggcgtaccggtaacgctggtcatttcgcagctggtgattacttctatcgcgttgatcatcctcaccaataccggtggcggtaacaacatgtccttcctgatcgcactggcgctgacggtggtgatttatctgtgtgcttatttcatgctgtttattggctacattgtgttggttcttaaacatcctgacttaaaacgcacatttaatatccctggtggtaaaggggtgaaactggtcgtggcaattgtcggtctgctgacttcaattatggcgtttattgtttccttcctgccgccggataacatccagggtgactctaccgatatgtatgttgaattactggtcgttagtttcctggtggtacttgccctgccctttattctctatgctgttcatgatcgtaaaggcaaagcgaataccggcgtcactctggagccaatcaacagtcagaacgcaccaaaaggtcacttcttcctgcacccgcgtgcacgttcaccacactatattgtgatgaatgacaagaaacactaactatgtctgaatggttataagataagggagcgataattcatcgctccctttttcgtgcttgctgtcgtattgacttaaccgggataagtacgagaatgagcgcacatctgtttaccggaaactagcacatatggatatctgctcccgaaacaagaaattaacgattagaagaccagcgatactggttgcactggcacttttactgtgtagttgtaaaagcacgcctccagagtccatggtgacaccaccagcgggttcaaagccaccagccacgacgcaacaatcgtcacaaccgatgcgtggcatctggctggccacggtgtctcgcctcgactggccaccggtttcctcggttaacattagtaaccccaccagccgggcccgtgtacaacaacaggcgatgatcgacaaactggatcatttgcaacgtctcggtataaacacggtctttttccaggtcaagccggacggtaccgccctgtggccatcgaanattttgccgtggtccgatcttatgaccggtaagattggtgaaaatccgggttacgatccgctgcaatttatgctcgacgaagcccacaagcgtgggatgaaagtacacgcctggtttaacccctatcgcgtatcggttaatacgaagcccggtactatcagggaactgaatagcactctgtctcaacaaccggcgagcgtctatgtgcaacaccgtgactggatcagaacgtctggcgatcgctttgtcctcgacccgggcatccctgaggttcaggactggatcacatcaatagtcgcagaagtggtttcccgctatccggtagatggcgtgcagtttgacgactatttctatactgagtcaccgggttcacggctaaatgataacgaaacgtaccgtaaatacggaggcgcatttgcgtcaaaagcagactggcggcgcaacaatactcagcagttaattgcaaaggtatcgcacaccattaaaagcattaagccgggagtcgaatttggtgttagcccggcaggcgtgtggcgtaaccgatcacacgatccgntcggttccgatacccgaggcgcggcagcctatgacgaatcctacgctgacactcgtcgatgggtggaacaaggattgctggattacattgctccccaaatttactggccgttctcacggagtgccgcgcgttatgacgtgttggtaaaatggtgggcggatgtcgttaaaccgaccaggacccgcctgtatatcggtatcgccttctataaagtgggtgaaccttcaaagatagagccagactggatgattaacggcggcgtaccggagctgaaaaagcagctcgatcttaacgatgcggtaccagaaattagcggcaccatcttgttccgtgaggactatctgaataaaccgcagactcaacaagcggtcagctatctgcaaagtcgttggggcagttaaactcccattcttactttgtnacaagccggtgctttacccactggcttgttaccctcttgaactatcccaccagcaatcatgcttactaaagtcaaattaaccacgcaattaaccacgcttagttaaacagccataaatcccctaataaaaatgtatgaatatgaaaaaccatacgatattcgcagtcaccgaaaaataattacgatgggctatactcttctgaagaacagtagcgtagattgaaactgtcctaagtcgcttatttcttttcagtatatcttcatatttcaggagaatatggtgcagttagtcgatctcgcacgtcgcgtttcattttgattccgtctgatttcccagccttataagggtgtgaattatggagatgtattttaaaagaatgaaagatgagtggaccggacttgtcgagcaggcagatccgcccattcgtgctaaagccgcggaaattgccgttgcgcatgctcattatctgagtatcgagttttatcgaattgtccgcatcgacccgcatgccgaagaattcttgagtaatgaacaagttgagcggcagttgaaaagtgcgatggaacgctggattattaacgtgctttctgcccaggttgacgatgtcgaaaggctaatacaaatccagcataccgtcgcggaagtgcatgcccgcataggaattccggtagaaattgtcganatggggtttcgggtgctgaaaaagatcctctatccggtaatcttctcttcggattattctgccgcagaaaaacttcaggtctaccatttctcgattaacagtattgatatcgctatggaagtgatgacccgcgcgtttacctttagtgacagtagtgcctcaaaagaagatgaaaactatcgtatcttctcgttactggaaaacgccgaagaagaaaaagaacggcaaatagcctcaatactttcatgggaaatagatattatctataaaatcctgctggattctgatttaggcagtagtttgcctttaagccaggctgattttggcctgtggtttaaccataaaggtcgacattatttcagcggcattgctgaagtgggccatatctctcgtctgattcaggatttcgacggtattttcaatcaaaccatgcgtaacaccaggaatttgaataacagaagtctgcgggtgaaatttttattacagataagaaataccgtatcgcaaattattaccttgctgcgtgaattgtttgaagaagtatcgcgccacgaagtcggtatggatgtactgacgaaattacttaaccgccgtttcctgccgactatcttcaaacgcgaaattgcccatgccaaccggaccggtacaccgctgtcagtgctgattattgacgttgataaattcaaagagatcaacgatacgtggggccataacactggcgatgaaattctgcgtaaagtctctcaggccttttatgacaacgtccgcagtagtgattatgttttccgctacgggggcgatgaatttatcattgttttgaccgaagcttctgaaaacgaaacgttacgtaccgcagaacgtattcgcagtcgggtggagaaaaccaaactgaaagccgcaaacggcgaagatattgccctctcactttccatcggtgccgccatgtttaatggtcatcctgactatgagcgcctcattcaaatagccgatgaagctctgtatatcgccaaaagacgaggtagaaaccgtgttgaactctggaaagccagtctttagatgcgccaggatgcagaggtaatcatgaagctaaccgatgcggataatgccgccgatggcatttttttccccgcccttgagcaaaatatgatgggtgcggtgttaattaacgaaaatgatgaagtgatgtttttcaaccccgccgcagagaagctctgggggtacaaacgtgaagaagtcattggcaataacattgatatgctgattccgcgggatttgcgtcctgcgcatcctgaatacattcgtcacaaccgtgaaggcggtaaagcgcgcgtcgaggggatgagtcnggagctgcagctggagaaaaaagacggcagtaaaatctggacccgttttgcgctatcgaaagtgagcgccgaggggaaagtttattacctggcgctggtacgggatgccagcgtagaaatggcgcaaaaagaacagaccaggcaattgattattgccgttgaccatctcgaccgaccggtgattgtcctcgatccggaacgccatattgtgcagtgcaatcgcgcatttaccgaaatgtttggttactgcattagcgaagccagcggtatgcagcctgatacactcctgaacattcctgaattccctgccgataaccgcattcgtttacaacagttgctttggaaaaccgcccgcgatcaggacgaatttctgctgttgacgcgcaccggtgaaaaaatctggattaaagcttctatcagcccggtttatgacgtgctcgcgcatctgcagaacctggtaatgaccttctcggatatcaccgaagaacggcaaatccgccagcttgaaggcaatattctcgccgccatgtgcagcagcccgccatttcatgaaatgggggaaatcatttgtcgtaacatcgaatctgttctcaacgaatcgcatgtttcgctgttcgcactgcgcaacgggatgccgatacactgggcgtcatcttcgcacggtgcagaagttcaaaatgcgcaaagctggtcagcgaccattcgtcagcgtgatggcgcgcctgcggggatcctgcaaattaaaacctcgtcaggagcagaaaccagcgcctttatcgaacgcgtggcagatatcagccagcatatggccgcgctggcgctggaacaggaaaaaagccgtcagcatattgaacaactcatccaatttgatccgatgaccggtctgccaaatcgcaataacctgcacaattacctcgatgacctggtcgacaaagccgtctctccannnncggtgttgaccatattcaggatgtgattgatagccttggctatgcgtgggccgatcaggcattgctggaagtggtcaatcgctttcgtgaaaaactcaaaccggatcagtatctctgtcgtatcgaaggtacgcagtttgtcctcgtgagcctggaaaacgacgtcagtaacattacccagatcgccgatgagctacggaatgtggtcagcaagccgataatgattgacgataaacccttcccgcttaccttgagtattggcatcagctacgacgtgggtaaaaatcgcgattacctgctctccactgcccataacgcgatggattatattcgcaagaatggcggtaacggctggcagttcttcagcccggcgatgaacgaaatggtaaaagagcgtttggttttaggcgcagcgctgaaagaagcgattagcaataaccaactgaaactggtttaccagccgcaaatcttcgcagaaacgggtgaactctacggcatcgaagcccttgctcgctggcacgatccccagcatggtcatgtgcccccttcacggtttattcctctcgcagaagagattggtgaaatcgaaaatattgggcgctgggtcatcgcggaagcttgccgtcagttagcagaatggcgtagccagaatattcatatcccggcgttatccgtgaacttgtcggcgctgcactttcgcagtaatcagctgcctaatcaggtgtctgatgcaatgcaagcctggggtattgacggccaccagctgacggtagaaatcacggaaagcatgatgatggaacacgataccgaaatctttaagcgcattcagatcctgcgtgatatgggcgtgggtttatcggtagatgattttggcacgggcttttccggattatcccgcttagtcagtcttccggtaacggaaatcaaaattgacaaaagttttgtcgatcgttgtctgacggaaaaacgcatcctggccttacttgaagccattaccagcattgggcaaagcctcaatttaaccgtcgtggcggaaggcgtcgaaaccaaagagcaatttgagatgctacgaaagatccactgtcgcgttattcagggatatttcttttcccgccccntacccnccgaagaaattccaggctggatgagcagcgtgttaccgctgaaaatctgacaaattcctntcgcccgcactcgcgggttttcatttaacgtgacactgtcacttaaatactgtgatttcagctacgattccgggagattccttccttaacttcccctcttgcaccaaaactgcactacgctgcacaaatgttgatcaaaagttaaaaaatataactttaagccagcattctggcgcttatcccggcatggcatgagatctgcataagcggaaagcgcagcaatttttgtcttatacaggaaccgtttatgtcggataccaccgaactggttgatttagccgtgatcttccctgatctggagatcgaattgaaatacgcctgcgctgataacatcacaggtaaagctatttaccagcaagcgcgttgtctgttacacaaggatgcgattaccgcgctggcgaaaagtatcagtatcgcccagctatcaggcttacaactggtgatttacgatgcgtatcgcccacaacaagcacaggcgatgttgtggcaagcctgcccagacccgcaatatgttgttgatgtgacggtcggttctaatcacagccgtggcacggcgatcgacctgacgcttcgtgatgagcacgggaacatcctggatatgggcgcagggttcgatgaaatgcacgagcgctcccatgcctatcacccttccgtcccgcccgccgctcagcgcaatcgcctgttgctgaatgcgataatgactggtggcggttttgtcggtatctccagcgaatggtggcacttcgaattaccccaggcagcgagttaccctctgctcgctgatcaattcacctgttttatatcccctggcacacagcacgtcagttaatcaggaaactgccatgaagagatcgatatcgtttcgtcccacattgctcgcgctcgtccttgccacaactttcccggttgcgcacgccgccgtaccgaaagatatgctggtgattggtaaggccgccgatccacaaaccctcgacccggcggtaacaatagataataacgactggacagtgacctacccgtcttatcagcgactggttcagtacaaaacggacggtgataaaggctcaaccgacgttgaaggcgatctggcaagtagctggaaagcgtctaacgatcaaaaagagtggacgttcaccctgaaagataatgctaaatttgccgatggcacacctgtcactgccgaagcagtaaaactctcttttgagcggttactaaaaatcggccaggggccagcagaagcatttcccaaagatttaaagattgatgctcccgacgaacatacggtgaagtttacccttagccagccatttgcaccgttcctctacacgctggcgaatgacggtgcatccattatcaatccggcggtattaaaggaacatgcggcggatgatgcccgcggcttcctcgcgcaaaataccgccggttccggaccatttatgctgaaaagctggcaaaaaggtcagcaattagttctggtgccaaatccgcattaccccggcaataaaccgaactttaagcgagtatcggtaaaaattatcggtgaaagtgcctcccgtcgcctgcagctctcccgtggcgacattgacattgccgatgcgctgccggtggatcaactcaacgccctgaagcaggaaaacaaagtcaatgtggcagagtatccgtcactgcgcgtcacctatctgtatctgaataacagcaaagcgccacttaatcaggcggatctgcggcgggccatttcctggtctaccgattatcagggcatggttaacggcattctgagtggtaacggaaaacaaatgcgcggcccgattccggaaggcatgtggggctacgatgcgacggcaatgcaatacaaccatgacgaaacgaaagccaaagccgaatgggataaagtgacgagcaaacccaccagcctgacgtttctctactccgataacgatccgaactgggaaccgatcgctctggcaacacaatccagcctcaacaagctgggcatcaatgtgaagctggaaaagctggcgaacgccaccatgcgcgacagagtgggtaaaggtgattacgacattgcgattggcaactggagtccggattttgccgacccgtatatgtttatgaattactggtttgagtcagacaaaaaaggtctgccgggtaaccgctcgttctatgaaaacagtgaggtcgataagttactgcgcaatgcgcttgcgaccaccgaccagacgcagcgtacccgagactaccagcaggcacagaaaatcgtcattgatgacgctgcttatgtgtacctgttccagaaaaactaccaactggcgatgaacaaagaggtgaaaggctttgtgttcaatcccatgctggaacaggtcttcaatatcaataccatgagtaaataacgtgaccttctggagtattttacgccaacgctgctggggctggtgctcgtggtggcgggcgtctgcgtgattacgtttattatctcgcatctgatccccggcgatccggcgcggttactggcgggtgaccgcgccagcgatgctatcgtggaaaatattcgccagcaactgggactggaccagccactgtatgtacagttttaccgntacgtcagcgacctgtttcatggtgacctgggaacatccattcgtactgggcgtccggtgctggaagagttgcgtatatttttcccggcgacgctggagctggctttttgtgccctgctgctggcactcttgattggcatcccgctgggcatactctctgcagtctggcgaaatcgctggctggatcatctggtgcgaataatggcgattaccggaatctccacacctgcgttctggcttgggctgggcgtcatcgtgctgttttatggtcatctgcaaatacttcccggcggcggaaggcttgatgactggctggatccaccaacgcacgttaccggcttttatctgctcgatgcgttgcttgaaggcaacggtgaagtcttcttcaatgcgttgcaacatctcatcttaccggcattaacgctggcgtttgttcacctggggattgtcgcccgccagatccgctcagcgatgctggaacaattgagtgaagactacattcgtaccgcccgggccagcggcttgcccggctggtatatcgttctatgttatgcgctacccaatgcgttgatcccttcgattaccgtattggggctggcgctgggcgatttgttgtatggcgcagtgctcaccgaaaccgtttttgcctggcccggaatgggggcatgggtagtgacatcaatacaggcgctcgacttcccggcagtgatgggctttgccgtcgtggtttcatttgcttatgtgctggtcaacctggtggtggatttgctctatttgtggattgatccgcgtatcggacgtggaggtggtgaatgatgctaagcgaggaaacgtccgccgtacgcccacaaaaacaaacgcgatttaacggtgcaaaactggtatggatgctgaaaggcagtccgctcaccgtgaccggcgcagtcatcattgtattaatgctactgatgatgattttttcaccgtggctggcgacgcatgatcccaacgccattgatttaaccgcccgccttttgccgccttctgcggcgcactggtttggcaccgatgaagtgggacgcgatctgttcagccgcgtantggtcggcagtcagcaatcaattctcgccggattagtcgtggttgccattgcgggtatgattggttcgctactcggatgtctatccggtgtgcttggcggacgcgcagacgccatcatcatgcgcatcatggacattatgctgtcgattccttcgttggtactgacaatggcactggctgccgctctcgggccgagtttgtttaacgccatgctggctattgctattgtgcgaattcccttttatgtgcgcctggcgcgggggcaagcattagttgtacgccagtatacctatgttcaggcggcgaaaacctttggcgcgtctcgttggcatctgatcaattggcatattttacgtaactccctaccgccgctgatcgtgcaggcatcgctggatatcggtagcgcgattttaatggccgccacgttgggatttattggcctgggtgctcaacaaccgagtgctgaatggggcgcgatggtagcaaatggtcgcaactatgtactcgatcagtggtggtattgcgcatttccgggggcagcgattttgcttaccgccgtcgggtttaatctctttggtgatggtattcgcgatctgcttgacccgaaagcaggaggaaagcagtcatgacccaacccgttctggacattcaacaactgcatttgagtttccccggttttaacggcgacgttcacgcgctcaacaatgtgtccttgcagattaaccgcggtgaaattgtcggtctggtgggagaatccggctcaggtaaatcagtcaccgcaatgctgattatgcgtctgctaccgacgggcagttattgcgtacatcgggggcagatttcactgctgggagacgatgttcttaacgcgcgggaaaaacagcttcgtcagtggcgcggcgcacgagtggcgatgatctttcaggaaccgatgaccgccctcaatccgacacgtcgaataggtcttcagatgatggacgtgatccgccatcatcaaccaataagtcgtcgggaagccagagctaaagcgattgccctgctggaagagatgcaaatcccggataccgtggaagttatgtcgcgctatccgtttgagctttcaggtggtatgcgccagcgggtaatgattgcgctggcattctcctgcgaaccgcaattgattattgccgacgaaccgactacggcgctggacgtcacggtacagttgcaggtactgcgtttgcttaaacataaagctcgcgccagtggaactgcggtactgttcatcagccatgatatggccgtggtgtcgcaactgtgcgatagcgtttacgtgatgtatgccggaagcgtgattgagagcggcgtgacggcagacgttatccatcatccccggcatccgtataccattggtttgctgcaatgcgcaccagaacatggagtaccacgccagccattacccgccattccagggacggtaccaaatctcacccatttgcctgacggctgcgcttttcgcgatcgttgctatgcggcaggtgcacagtgtgaaaacgtcccggcgctgacagcgtgtggtgacaacaaccagcgctgcgcctgttggtatccgcagcaggaggtcataagtgtctgacacgttattaacgttacgcgacgtccatatcaatttcccggcgcgtaaaaactggcttggtaaaactacggaacatgttcatgccattaatggtattgatttacagatccgccgtggtgaaaccttagggatcgtcggcgagtcaggctgcggcaaaagcaccctcgcacagcttttaatgggtatgctgcaaccgagccacgggcagtacatccgttctggctcacaacgcattatgcagatggtgtttcaggacccgctctcttcgcttaatccgcgcttaccggtgtggcgcatcatcacagaaccgctctggatagctaagcatagtagtgaacaacagcggcgagcgttggcagaggagctggcngtgcaggtgggtattcgtccggagtatctcgaccgcctgcctcatgcgttctccggcgggcagcggcaacgcatcgccattgccagagcactctcttcgcagcctgacgtgattgtgcttgatgagccaacctctgcgctggatatctccgtgcaggcgcagatcctcaatttactggtaacgctacaggaaaatcacgggctgacttatgtgctgatttcacacaatgtctcggtgatacgtcatatgagcgatcgggtggcggtgatgtatctcgggcagattgtggaattaggggaagcgcaacaggtgctaacggctccggcacatccatacacccgattattgctggattccctccccgccattgataaaccactggaggaagaatgggcattacgtaaaacggatctgccaggaaaccgcacgttgccacagggctgttttttccgcgaacgttgcccccttgcaaccagcggatgcgaagtccggcaatcattaacgacgcgggctgacggacgtgagatccgttgctggcgggcgctgtagagatgctaacaacgcatcaggcattcatgcgcctgacgcgtcatccggcaatgctttacgatttcaactggtaatccagcgtaatttccgctttcagtacctgagagaccgggcatcctgcttttgctttctggatgatgccgtcaaaggtagaggcatcaatacccggcaccgcaacttcactcttcagtgcgattttcgtaatcgcaaaaccggcatccactttatccagcgacacatcggcggtggtatcaatcgatgttggcgtgaatcccgcttcccccagcattaatgaaagcgccattgagaaacatgcggcatgcgctgcgccaatcagttcttcagggttggttcctttttcgccttcaaaacgcgtgttaaatccatacggctgttggttcagcacgccactctcggtggatacagttcccttcccgcgtttgatatcgctttcccagtgtgcctgacctttcttatggattgtcattgttgctctcctgtgggcttaaaaaggaaattatagactacgtgagaaaccgcacgaggataagcaggatattccgaataaaatacnggcaaaaatattacttctgcacttaaattaaattcccacaatagataaccggaaatatatatctcaagagagattgcatcaatattaatcaactcatcacaataataatacctatcaatatcatggggttaaaatataaaaatcatcaaccaggactaatcttaacaacgaagcggcaannatttgccatgctgaatgtgctttataaatctgcgatccgtagcagacactataaatacacagacacggagaatcactatgtttacttattatcaggcagaaaattcaacagcagaacccgctctggttaatgccattgagcaaggccttcgggcagagcacggtgttgtcactgaagatgacattctcatggagctgaccaaatgggtggaagcttctgataacgacatcctcagtgatatctaccagcaaacgatcaattatgtggtcagtggccagcaccctacgctttaagatgctatgcttgatcggcaacctaatttaggggtttagcacgtgtttcttcgctacggcgatgttgtccttaaaactagcaacaggattgaggagttaaaatgaaatcgaaccgtcaggcacgtcatattcttggactggaccataaaatatctaaccagcgcaaaatagttaccgaaggtgacaaatccagcgtggtaaataacccaaccggcagaaaacgccccgctgaaaagtaattcataaccatcagncctcaatgacgattaaacaccattgcctgcgcaatggtgtttttgtttttatctgctttatacttggggccgacgccctggcggtaaagcaaagacgataaaagccccccagggatggatattcaaaaaagagtgagtgacatggaaccaaaaacaaaaaaacagcgttcgctttatatcccttacgctggccctgtactgctggaatttccgttgttgaataaaggcagtgccttcagcatggaagaacgccgtaacttcaacctgctggggttactgccggaagtggtcgaaaccatcgaagaacaagcggaacgagcatggatccagtatcagggattcaaaaccgaaatcgacaaacacatctacctgcgtaacatccaggacaccaacgaaaccctcttctaccgtctggtaaacaatcatcttgatgagatgatgcctgttatttataccccaaccgtcggcgcagcctgtgagcgtttttctgagatctaccgccgttcacgcggcgtgtttatctcttaccagaaccgccacaatatggacgatattctgcaaaacgtgccgaaccataatattaaagtgattgtggtgactgacggtgaacgtattctggggcttggtgaccagggcatcggcgggatgggcattccgatcggtaaactgtcgctctataccgcctgtggcggcatcagcccggcgtatacccttccggtggtgctggatgtcggaacgaacaaccaacagctgcttaacgatccgctgtatatgggctggcgtaatccgcgtatcactgacgacgaatactatgaattcgttgatgaatttatccaggctgtgaaacaacgctggccagacgtgctgttgcagtttgaagactttgctcaaaaaaatgcgatgccgttacttaaccgctatcgcaatgaaatttgttcctttaacgatgacattcagggcaccgcggcggtaacagtcggcaccctgatcgcagcaagccgcgcggcaggtggtcagttaagcgagaaaaaaatcgtcttccttggcgcaggttcagcgggatgcggcattgccgaaatgatcatcgcccagacccagcgcgaaggattaagcgaggaagcggcgcggcagaaagtctttatggtcgatcgctttggcctgctgaccgacaagatgccgaacctgctgcctttccagaccaaactggtgcagaagcgcgaaaacctcagtgactgggataccgacagcgatgtgctgtcactgctggatgtggtgcgcaatgtaaaaccagatattctgatcggcgtctcaggacagaccgggctgtttacggaagagatcatccgtgagatgcataaacactgtccgcgtccgatcgtgatgccgctgtccaacccgacgtcacgcgtggaagccacaccgcaggacattatcgcctggactgaaggtaacgcgctggtcgccacgggcagtccgtttaatccagtggtatggaaagataaaatctaccctatcgcccagtgtaacaacgcctttattttcccgggcatcgggctgggtgttattgcttccggcgcgtcacgtatcaccgatgagatgctgatgtcggcaagtgaaacgcttgcccagtattcgccgctggtcctgaacggcgaaggtctggtactaccggaactaaaagatattcagaaagtctcccgcgcaattgcgtttgcggttggcaaaatggcgcagcagcaaggcgtggcggtgaaaacgtctgccgaagctttgcaacaagccattgacgataatttctggcaagccgaataccgcgactaccgccgtacctccatctaagcctgcgcccggtagtgaaggctaccgggctatttccctctccctttttcagatctcatccatactgggtagtggcgaataaatctcatttgcctcacctgctatgcagaacatcatccgaaaaggaggcactatgaaggctgcagttgttacgaaggatcatcatgttgacgttacggataaaacactgcgctcactgaaacatggcgaagccctgctgaaaatggagtgttgtggtgtatgtcataccgatcttcatgttaagaatggcgattttggtgacaaaaccggcgtaattctgggccatgaagggattggtgtggtggcagaagtgggtccaggtgtcacctcattaaaaccaggcgatcgtgccagcgtggcgtggttctacgaaggatgcggtcattgcgaatactgtaacagtggtaacgaaacgctctgccgttcagttaaaaatgccggatacagcgttgatggcgggatggcggaagagtgcatcgtggtcgccgattacgcggtaaaagtgccagatggtctggactcggcggcggccagcagcattacctgtgcgggggtcaccacctacaaagccgttaagctgtcaaaaattcgtcccgggcagtggattgctatctacggtcttggcggtctgggtaacctcgccctgcaatacgcgaagaatgtctttaacgcgaaagtgatcgccattgatgtcaatgatgagcagttaaaactggcaaccgaaatgggtgcagatttagcgattaactcacgcaccgaagacgccgccaaaattgtgcaggagaaaaccggtggcgctcacgctgcggtggtaacagcagtagctaaagctgcgtttaactcggcagttgatgctgtccgtgcaggcggtcgtgttgtggctgtcggtctgccgccggagtctatgagcctggatatcccacgtcttgtgctggatggcattgaggtggtcagttcgctggtcggcacgcgccaggatctaactgaagccttccagtttgccgccgaaggtaaagtggtgccgaaagtcgccctgcgtccgttagcggacatcaacaccatctttaccgagatggaagaaggcaaaatccgtggccgtatggtgattgatttccgccgctaagaggcctttgctgcgactcccatgttcgggtcgcagcatcgcacactctccaacatgaaatggctaaatggattattgttgcgtaggaaggaacaataatgatagtgttcccagagaaggaacgctactgagagtaaagacactaatgaaaatggccaatcatccccgcccgggggacattattcaggaatcactggacgaacttaatgtcagcctgcgcgagtttgccagagcaatggaaattgctccctcaacggcaagccgattgctgaccggaaaagcagctttgacgccagaaatggcaattaaactttccgtggtgatcggcagttcgccgcaaatgtggctgaatctgcaaaacgcctggagtctggcagaggctgcaaaaacggtggatgtgtcgcgattacgccgtctggttgcgnnnnnnnnnnnnnnnncttttacagcgccattttcagcttaaagttcaaaagagattatatcccttcttcactctcttttttcgcttctgccttctcgatttcacgataccagcgcggatggtgtttcttcgcccagcgacggctcaccttcccttcgatcatccctttaatcgatcctttcacccagaatgccatatacatatggatcaggatggcgtggatcaggatgatacccgcagccgcgtggatcagcaggctgtagcgaacaacctgcatcgggaagtactgcgcaaagtacggacgccagataatcaccccggtcaccagcagcacgaaaatcatgctcatgatcgaccagaacatcatcttttgcccggcgttgtacttaccgacatccgccactttatgctcattgcctttcaatacttcgacaatgtttaacagccacggaatatctttcttatccgggatgttgtgatgcacaaaacgcacaaacataaacatcagtgcgacgaaaatcgcaatgccgaagaatgggtgcaaaatgcgtcccatctgcggcgtaccgaaggtttgcgtcagccattgcagcgtcgggaagaagaacgaaatcccggacagcgccaccaggaagaagcaaatcaccacggtccagtgacaggcgcgatcaataaatttggtgcgcacaatcattttcgacttactcatgatgatcctcctcgtcatcgtccacttccttattcgggccaataccgatgtagtggaaaatcaaccctgcaaaagtggcaataaagccagccgctgccagcggtttcaacgcgcctttccacaggcttaccgaggtgtcgatcttcggatctttcggcagaccgtgatacagctccggctgatcggcgtgatgcagcacgtacataacgtgcgtaccaccgaccccttccgggttgtagacgccagcatgttcgtaaccacgcgctttcagtttcgccacgcgctgttccgccagctccagcatctccttcttggtgccgaagtggatagccccggtcggacaggttttcacacaagccggttcctggccgacgctgacgcgatcgacgcagagcgtgcatttatatacccggttatcctctttgttgaggcgcggaatattaaacggacacccggcaatgcagtaaccacagccgatgcagttttccgactggaaatcgacaatcccgttagcgtactgaatgattgcaccggcagacgggcacgccttcaggcagcccggatcttcacagtgcatacagccatctttacggatcagccactccagcttgccgctctgttcggtttccctaaagcgcatcaccgtccaggacttggcgctcagatcggcggggttatcgtaaaccccgacgcagtgccccacttcatcacggatgtcgttccactccgaacacgccacctgacaggctttacagccgatacaggtggaaacgtcgataagttttgcgacttctgctttgtaatcacgcacctgagaaggcggcgtgatggagttagttgcggaccttttgataatgtcctgcgtttccatagccatctgttcgnccccttacgccttctcgatgttgactaagaacgctttatattccggcgtttgcgagtttgcatcaccgacattcggcgtcagagtgttagcgatataacctttacgcgcgacaccctcaaagccccagtggattggaatacccaccgtttcaacctgctgaccatttacattcagcggtttcagacgacgcgttaccacagccaccnnnnngataaagccacgcttgcttgagacagtgacacgatcgccattattaatgcctttcgccgccgccagcgtttcgctgatttccacaaactgttccggctgagcaattgcgttgagcaacgcgtgcttggtccaggtgtggaagtgctcggtcagacgataggtcgtacccacatacgggaactgctcttttttacccatccgcagcgcgtcttgttcatacagacgaaccaccgggttagaaaccacgttcggatgcagcgggttagttcccagcggcgtttcaattggctcgtagtgttccgggaacggaccttccgccattttgttgatggcaaacaggcgtcccatcccttccggctgcatgataaacggcccggttggcgtacccggtgcggcattgccgaagtcagggatatcgttacccgtccacttgctgccgttccactggatcagcatccgtttcggatcccacggtttaccgttgatatctgccgaagcacggttgtagagtacgcgacggttaagcggccacgcccaggcccatcccagcgtattccccagaccggacgggtcggagttatcgcggttagccatctggttgccctgctctgtccagctaccggtgtagatccagcaagaagatgcggttgtaccgtcatcacgcagatgcgcaaagctactcagcaactgacctttcttcgcaatcagcacgccattagcatcatagagatcttccagcgcatagccgttgttctctttagctacttcgtcagattgcggttcgtgcggctgcttgtagttccagctcatcttcatcagcggttctacgcctttaccaccttcagcctggtacagctcgcgcagatgatggtagatacccgccagaatttcgccgtcgttacgcgcttcgcccggcgcgtcctgacctttccagtgccactgcaaccagcgaccggagttagcgatagaaccatcttcttctgcaaagcaggtcgaaggcagacggaatacttcagtctgaatagacgccggatcgacatcgttcgactcgccgtggttctgccagaaggtagaggtttcagtcaccagcggatcgataaccaccatgtacttcagcttgctcaggcagctcaccactttgtttttgtccgggaaggacgcaaccgggttaaagccctggcagaaataaccggtgactttgccttcatccatcatgttgaaatacttgatgacgtcgtaggtctggtcccacttcggcagccagtcatagccccagttgttctctttctgcgcggcatcgccatagaaagatttcatcaggctaacgaagaacttcggatagttgctccagtagttcacctgaccagccagcgtcgctttcggcgtgttcgcttccagatacgactgcaaatcaacctgtttttctgacggcagcgtcagataacctggcaggctggtagagagcagacctaagtcagtcagaccctgaatgttggagtgaccacgcaatgcattcacgccgccaccggccatacccatgttaccgagcagcaactggatcatcgccatagtacggatgttctgcgcacccacggtgtgctgcgtccagcccagcgcgtacaggaaggtggttgtgcgatccggtgcgctggtggaggccagcacttcacacactttcaggaagtcggcttttggcgtaccacagatgttttcaacaacgtccggcgtgtagcgggaaacgtgctctttcagcaggttccacacacagcgcggatgagtcagtgtttcatcgcgttttgcatagccgttttcatcgaactgatagttccaggacgacttatcgtactggcgtttttcagcgtcgtagccgctgaacagaccgtcttcgaaagcaaaatcatcacgcaccagcaggctggcgttggtgtaatgcttaacgtattcggcgttgattttgttgttttcgatcaggtagcgcaaaatgccagacaggaacgtaatgtccgtaccggaacgaataggcgcgtagatatccgccacagaagcggtacncgtaaaacggggatcgacaacgatcaaggttgcatcgttgttgtttttcgcttccatcgcccagcggaaaccgacgggatgcgcttcagcagcgttaccgcccattaccattacgacgttagcgtttttgatatccacccagtggttggtcatcgcaccgcgaccaaatgttggagcaagacttgctaccgttggtccgtgtcagacgcgcgcctggttgtctaccgccagcatcccgagggagcgggcaaatttctgggtcagcatcccggtttcgttgctggcaccggaagcacacagcataccggtagaaagccaacggtttaccgttacgccctgctcgttcttttcaataaagttagcgtcacggtcagctttcatcagcttcgcaatacgggagaatgcttcttcccagctaatgcgctgccatttgtcagaacctggcgcacgatattccgggtagcgcagacggttttcgctgttgacgtaatccagcaaaccggcccctttcgggcacagcgcaccacggcttaccggatgatccgggtcaccttcaatgtgataaatcgcttctctggcgtttttcgcgccatcacccaggctatacatcaatagcccgcaacctacggaacagtatgtgcaggtgttacggatctctttagcgcgtaataatttgtagtttcgcgcctgagccagtgcttgcttcggggcaaagcccaatgccgctactgttgttccagccataccgcccgcgcagattttaaaaaattgtctgcgactgacgtccattgctttcctcttttttcaggggtattactgcgcgaggaaactaacagtaaaattctgaatctttttgcgcgaaatcaaaaagaacacgtgtttgccacaaaataatccgcctgcgcaaattgacctacctcaatagcggtagaaaaacgcaccactgcctgacaggccagttaaaaaaatgctataaaattcagcttaatttttaacggcaagagagacaaaacagcgagcatgacacgacaaaaagcaacgctcatagggctaatagcgatcgtcctgtggagcacgatggtaggattgattcgcggtgtcagtgaggggctcggcccggtcggtggcgcagctgctatctattcattaagcgggctgctgttaatcttcacggttggatttccgcgtattcggcaaatcccgaaaggctatttactcgccgggagtctgttattcgtcagctatgaaatctgtctggcgctttccttagggtatgcggcgacccgtcatcaggcgattgaagtgggtatggtgaactatctgtggcccagcctgacaattctctttgccattctgtttaatggtcagaaaaccaactggctgattgtaccaggattattattagccctcgtcggcgtctgctgggtgttaggcggtgacaatgggttacattatgatgaaatcatcaataatatcaccaccagcccattgagttatttcctggcgttcattggtgcgtttatctgggcagcctactgcacagtaacgaataaatacgcacgcggatttaacggaattaccgtttttgtcctgctaacgggagcaagtctgtgggtttactattttctcacgccacaaccagaaatggtatttagcacgccagtcatgattaaactcatctctgcggcatttaccttaggatttgcttatgctgcatggaatgtcggtatactgcatggcaacgtcaccataatggcggtaggttcgtattttacgcccgtactttcctcagcgcttgcagccgtgctgctcagcgccccgctgtcgttctcgttctggcaaggcgcgctgatggtctgcggcggttccctgctctgctggctggcgacacgtcgtggctaaaataattgccgggtctacggcccggcaattaatcagataaaccccgacnatattaaaaaataaatttcaaataccagtaattcaccttatatctcatttcgacttcgatcacatatcgataaatnntnnnatttcatctatttttctcattgtttttaatcaccattctaattnnnnnnnnnnnnnnnnnnnnnnnnnnnnnccgtttaaaattcgtttagaaaatacgtttaacgataattaaaaggattctgttaaatgaanttaaaaatagttgcggtggttgtaactggtttgttagctgcgaacgtagcacacgctgccgaagtctataacaaggatggtaataaactcgacctttatggcaaggttaccgctctacgttattttactgatgataagcgtgacgatggtgataaaacttatgcccgtctcggctttaaaggagaaacgcaaatcaatgatcaaatgattggttttggtcactgggaatatgattttaaaggctataacgatgaagccaacggctcgcgcgacaacaagacccgtctggcctatgctggtttaaaaattagtgaatttggctctctggactatggccgtaactacggtgtcggctatgacattggttcatggactgatatgttgccagaatttggtggcgatacctggagtcagaaagatgtcttcatgacataccgtaccaccggtgtagcaacctatcgcaactacgatttctttggcttaattgaagggctgaactttgccgcgcaatatcaaggcaaaaatgaacgtactgacaacagtcatctttatggtgctgactacacgcgtgccaacggtgacggtttcggtatctcctcaacttatgtttatgatggctttggtatcggagcggtgtataccaaatccgatcggacaaatgcgcaggaaagagccgctgctaatcctctcaatgcctccggtaagaatgcagaactgtgggctacaggtataaaatatgatgccaacaacatctactttgcagctaattacgctgaaacattaaacatgaccacctatggcgatggttatatttctaacaaagcacaaagttttgaagtggtggcgcaatatcaattcgacttcggcttgcacccctcactcgcttacctgaaatcgaaaggcatagatctgggccgctacggcgatcaggacatgattgagtatatcgacgttggtgcgacgtatttcttcaacaaaaatatgtcgacctatgttgattataaaatcaacctgattgatgaaagcgactttacccgtgccgtagatattcgcaccgataacatcgtcgctacgggcattacctatcagttctaacatcctctcctgaccagcccttctctgggctggtttttgatttaagtgctgctgtatgactccttaagtaaaaatgagcaatttttgatatttctggccattcacctcaattaatattattccatacccccggggacatcttactataatatttattgatgagtgattatgaccaatattaatacagcttgtgtaaaaaataatgccagttatcaaattaataacgcattacctaacaaagaaaccatctccagcaatttttatgaacgactagaacaatggggtaataagtcgcttaataatggtgaagaaagagcaattgccgtggagcgaattaaagaagcttacaattcgaacatggcatctcttgatttgtcatatcttgatttgagtgagttaccgcctatcccctcgacagttaatacgttaaatctggaaaacaattgtctaacttgtcttgactttactgacaatgccagtctcgttaatatcaacctcagctttaataaaattaacacgataacctttccaaatgaatcaaatctggaaaacatttatattgatcataataatctggaaagtttagatttaaaaaatcagcattcattggttaatctggaagcgcaaaataataatctaaaaaaattaatatttctgatagttataaactgaaatttcttaatcttgattataacaagctagcatcgctggatgtctcccggcaagagtctctgattgagttaagtgcccatcacaatatgatcactgaccttatattacacaatcatcccaggatgaaaacaatcactttaaacgacaaccatattgcacatttaaacaccaaaactactacaaaacttgaatatttaaacttaagcaataacaatttattgccaaccaatgacattgatcaactaatatcatcaaaacatctttggcatgtattagttaacggcatcaacaatgattcacttgcacaaatgcagtactggactgcagtaagaaatataattgatgacactaatgaagtgaccattgatttatcttataatctggcaatcacaaatatcgataccagtgatgaacatcttgtagaagtaagcgataattcagaaggtaattatataaaagacaatgactcaatgtctattcgttatagatcaaaatattattccagagattccgccttaatagaagaagaaacaatattttctgacgcagaactaaaagctattctgcctatgcgtcgcatgtacggggttagtgactataagtcaaattcctcttctctatcctcacactcgggactcaaggacccaacgggcacacccgtctgttattatattcataatgagagtaaaccttccttaggttatggtccaacatccaataattggttaagccaatcctttacaacagagttataaaacacatcctggtttatcaagggtgataaatcagaaaaacattgtattactatggagcagttatgaaattcccttcaatatttaacaaaataaaaccacaatccatacagcaacatccagaaaaaaatcaacttaactggatgctcgaattaaataaatggaaagaagaacgtatacttacaggtgaaatccatcgtccggaatgtcgaaacgaagccgctaaaaggataaactgtgcttttttgtcgaaacagaatgacattgatttatcaggacttaatttatctactcaaccaccagggctgcaaaacttcacctctatcaatcttgataataaccaactcacacattttgatgcaaccaactacgatagactcgtaaaacttagtctgaatagtaacactcttgagtcaataaatattcctcaaggcagaaatgtaagcattacacatatatctatgaataataattgtctcagaaatattgatatagataggctttcatcaattacttattnnnnnnnnnnanntaataaactagagtttgtgcaattagaatcttgcgaatggctgcaatacctgaatctcagccataatcaattaactgatattgttacaggaaataaagaagaactcttactgctggatctatcccataataaactagcaagtttacacaatgccttatttcccaacttaaatacgttacttatcaacaacaacttgctttctgaaattaaaatgttttatagcaacttctgcaaagttcagacattaaacgctgctaacaatcagttggaaaaaataaaccttcatttcctgacttatctttcatctatcaaaagtttaaggctggacaataataaaataactcgcattgatactgagaacacatccgatattagaagtttattccccataataaagaagagcgaaagcttaaattttttanatatttctggcgagaacaattgccctactatccagctcatgttatttaatttgttttccccagcacttaagcttaatactggcctggcaattctttcgcctggtgcatttgaagatcactctgacggattagatgtggataacgaattgtttcactatactattaataaagcatataccccatataatatacatacttataaaacagaagaagttgtaaaccagaggaatataaaaattaaaaatatgaccttagatgaaataaacaatacttattgtaataacgattattacaatgaggcaataagagaggaaccgatagactttctggacagatcgttttcctccagctcatggcctttttatcactaattctataagtgtctggtcttgttaaaaatatagttaatatacaaccctttggattcatcatctgaagggttgaatcatgacatgcgtacatagcttaaccccgtttaatggttagcttgttagttacatttagtaacacataactggctgcttaatccccattctgcccccgcggttacgctttcttatctattctttcaatcagcacttcacccatttcatccttaattctaataactggctattgcgccttacctcctgttttgtctttttttcattaccaatgtgtacatgtgaggaacaatatggcactgcaaaatgagaaaaatagtcgttatcttttacgcgactggaaaccagaaaatccggccttctggaaaaataaaggaaaacatattgctcgaagaaacctctggatatcagtcagttgtctacttcttgccttctgtgtctggatgctatttagcgcagttaccgttaatctcaataaaatcggttttaatttcactaccgatcaactctttttattaaccgcattaccctccgtttctggcgcattattacgtgtcccctactcctttatggtgcctatattcggtggacgtcgatggacggtttttagtactgcaatcctgattattccttgcgtctggctcggaattgccgtgcagaatccgaatactccttttgggatatttatcgttatcgctttgctatgcggttttgcaggtgcgaactttgcttcgagcatgggcaatatcagtttcttctttccaaaagccaggcaaggtagcgctcttgggattaatggcggattaggaaacttaggtgtaagtgtaatgcagctggttgcaccgctggtcatttttgtacccgtatttgcctttctcggcgtcaatggagtaccgcaggccgacggttcggtgatgtcgctggcgaatgccgcatggatttgggtaccgctactagcgattgccacgatcgccgcctggtcagggatgaatgatatcgccagttcacgcgcgtcaattgccgaccagctccctgtcttacaacgcctgcatctctggctgctgagcctgctttaccttgccaccttcggttcgtttatcggtttttctgcgggtttcgccatgctggcaaaaacccagttcccggatgtgaatattctgcgcctggcgttctttggcccatttatcggtgccatcgcgcggtcggtgggtggtgctatttccgataaattcggcggcgtgcgggtgacgttgatcaactttatttttatggcgattttcagcgccctgctgttccttaccttaccgggcacaggctccggtaacttcatcgccttttacgccgtatttatggggctgtttctgaccgcgggtctgggaagtggttctactttccagatgatcgccgtcatctttcgccagataaccatttatcgggtgaagatgaaaggcggtagtgatgagcaagctcagagagaagccgtcaccgaaacggcggcggctctgggctttatctcagccatcggcgcagtgggcggcttttttattccgcaggcatttggcatgtcactcaatatgaccggctctccagtgggcgcgatgaaagtgtttttaatcttctacatcgtttgtgtgctactgacctggctggtttatggtcggcggaagttcagccaaaaataagagatcgatgcctgatgtacaaccgtgtcgcatccgacaaggcatcagatcccaattcattcctggagcaggagtcatgtcatgagtaaacttttggatcgctttcgctacttcaaacaaaagggcgatacctttgccgatggtcacggacaggtgatgcatagcaaccgcgactgggaggacagctatcgccagcgttggcagttcgacaaaatcgtgcgttccacccacggtgttaactgtacaggctcctgtagctggaaaatctacgttaaaaatggtctggtgacctgggaaatccaacagaccgactacccgcgcactcgccctgacctgcccaatcatgaacctcgcggctgcccgcgtggcgcaagttactcctggtatctttacagcgctaaccgcctgaaatacccgctcattcgtaaacgactgattgaactgtggcgcgaagccctcaaacaacacagcgatccggtactggcgtgggcatcgattatgaacgatccgcaaaagagcctgagctacaaacaagtgcgtgggcgcggcgggtttatccgctccaactggccggaactaaaccagctgattgccgccgctaacgtctggactatcaaaacctacggcccggatcgcgttgccggtttctcgccgatcccggcgatgtcgatggtttcttacgccgccggaacacgttatctgtcactattaggtggcacctgtttaagcttctacgactggtattgcgacctgccgcccgcctcgccgatgacctggggcgagcaaaccgacgtaccggaatctgccgactggtataactccagttacatcatcgcgtgggggtctaacgtaccgcagacacgtacgccggacgcccatttctttaccgaagtacgctacaaaggcactaaaaccatcgccattacccctgactactctgaagtggccaaattgtgcgaccagtggctggcaccaaaacaaggcactgatagcgccctggcgatggcaatgggccatgtgattttaaaagagtttcatctcgataatcccagcgactactttatcaactactgccgccgctatagcgacatgccgatgctggtaatgctggaacctcgcgacgatggtagctacgtacccgggcgcatgatccgcgcgtctgacctggtagatggactaggcgaaagcaataatccgcagtggaaaaccgtggcggttaataccgcaggtgaattggtagtgccgaatggttcgattggtttccgctggggagaaaaaggcaaatggaatctggaatccattgccgccggtaaggaaaccgaattgtcgttaaccctgctcggtcaacatgacgccgttgcaggcgtggctttcccctactttggcggcatcgaaaatccgcattttcgcagcgtcaaacacaatcctgtcctggtgcgtcaattacccgttaaaaacctgacattagccggtggcagcacctgtccagtggtcagcgtttatgatttggtactggcgaattacggcctcgatcgcgggctggaagatgaaaacagcgcgaaagattacgctgaaatcaaaccgtacaccccagcctggggtgagcaaattaccggcgtgccgcgccagtatattgaaaccatcgctcgtgaatttgccgatactgcccataaaacgcatgggcgctcgatgattatcctcggcgcaggtgttaaccactggtatcacatggacatgaactaccggggaatgatcaatatgctgatcttctgcggttgtgtcggacaaagcggtggcggctgggcacactatgtcggtcaggaaaaactgcgcccgcaaaccggctggttgccgctggcctttgcgctcgactggaaccgaccaccgcgccagatgaacagcacctcgtttttctacaatcattccagccaatggcgctatgaaaaagtctctgcgcaggagttactttcaccgcttgccgatgccagtaagtacagcggtcatctgattgattttaacgttcgcgccgaacgcatgggctggctaccttctgcgccgcagttggggcgtaacccgctcgggattaaagctgaagccgacaaggccggattatcccccacagaatttaccgcccaggcgctgaaatcgggcgatttacgtatggcctgcgaacaaccagatagcggcagcaatcatccgcgtaatttgtttgtctggcgttctaacctgcttggctcctccggcaaaggccacgagtatatgcagaagtatctgctggggaccgaaagcgggattcagggcgaggaactcggtgccagcgacgggatcaaaccggaagaagtcgagtggcaaactgcggcgattgaaggcaagctcgacctgctggtgacgctcgacttccgcatgtccagtacctgcctgttctccgatatcgttctgcccaccgccacatggtatgaaaaagacgatatgaacacctcggatatgcatccatttattcatccgctttctgcggcggtcgatccggcctgggaatcacgcagcgactgggaaatctacaaaggtattgccaaagcattttcgcaagtgtgcgtgggccatcttggcaaagaaaccgacgtggtattacaaccactgctgcatgactctccggcagagctctcacagccgtgtgaagtgctcgactggcgcaaaggcgaatgcgatctgagcccgggtaaaaccgcgccgaatattgtggcggtggagcgcgactaccctgctacgtatgaacgctttacctcgctcgggccattgatggacaaacttggcaacggcggtaaagggatttcgtggaatacgcaggatgaaatcgatttcctcggtaaactcaattacaccaagcgtgatggcccagcgcaggggcgtccgctgattgacaccgccattgacgcttcagaagtgattctggcactggcaccagaaaccaacggtcatgttgcagttaaagcgtggcaggcgctgggcgagatcaccggacgcgaacatacccatctggcgctgcacaaagaggacgagaagattcgctttcgcgatattcaggcgcagccgcgtaaaattatctccagccccacatggtctggtctggaaagcgatcacgtctcctataatgcgggatacaccaacgttcatgagttaattccgtggcgcacgctgtcgggacgccagcagctctatcaggatcatccgtggatgcgtgcttttggtgaaagcctggtggcatatcgcccgcctatcgacacccgtagcgtcagtgagatgcgccagatcccgccaaacggcttcccggaaaaagcacttaacttcctgacgccgcaccagaaatggggcattcactcaacctacagtgaaaacctgctaatgctgacgctctctcgcggtggaccgattgtctggatcagcgaaaccgatgcccgtgaactaaccattgtcgataacgactgggtggaagtgtttaacgccaatggcgcgctgacggcccnngcggtggtcagccaacgtgtaccgccgggtatgaccatgatgtatcacgctcaggaacgcattatgaatattcctggttcggaagtaactggcatgcgcggcggtattcataactcggtcacccgcgtttgcccgaaaccaacgcatatgattggcggttacgcgcagctggcctggggctttaactactacggcaccgtcggctcgaaccgcgacgaattcatcatgatccgcaagatgaagaacgttaactggctggatgatgaaggtcgcgatcaggtacaggaggcgaaaaaatgaaaatccgttcgcaagtcggcatggtgcttaatctcgataaatgtatcggctgccatacctgttcggtgacctgtaaaaacgtctggaccggacgcgaaggcatggagtacgcatggtttaacaacgtcgaaaccaaaccgggcattggttatccgaaaaactgggaagatcaggaagagtggcaaggcggctgggtccgcgatgtgaatggcaagatacgcccgcgtctgggcagcaagatgggtgtaataaccaaaatcttcgccaacccggtggtgccgcagattgatgattactacgaacctttcaccttcgactacgaacatttgcatagcgcaccggaaggcaaacatatccctactgctcgcccgcgttcgctgattgacggtaagcggatggacaaagtgatctgggggccaaactgggaagaactgctgggcggcgagtttgaaaaacgtgcccgcgaccgcaacttcgaggccatgcaaaaggagatgtacgggcagtttgaaaacaccttcatgatgtacctgccgcgcctgtgcgaacactgcctcaatcccagctgcgtggcgacctgcccaagcggcgctatctacaaacgcgaagaagacggcattgtgctgattgatcaggataaatgccgtggctggcgtttgtgcattagcggttgtccgtacaaaaaaatctacttcaactggaaaagcggcaagtcagaaaaatgtatcttctgttacccacgaattgagtccggtcaaccgaccgtgtgctcagaaacctgcgtgggtcgcatccgatatctgggcgtgctgctttatgacgctgaccgcatcgaggaagcggcgagcaccgagcgcgaggttgacctctatgaacgccagtgcgaagtgttcctcgatccgcacgatccctcagtgatcgaggaagccctgaaacaaggtattccacaaaatgtgattgacgctgcccagcgttcgccagtctacaaaatggcgatggactggaaactggcactaccgctgcaccctgaataccgcaccctgccgatggtctggtacgttcctccgctgtcaccgattcagtcctacgcagatgcgggcggtttgccgaaaagcgaaggcgtgctgcccgccatcgaaagcctgcgtattccggtgcaatatctcgccaatatgttgagtgccggcgataccggtccggtactgcgggcgctgaaacggatgatggcgatgcgccactatatgcgttcacaaaccgtggaaggcgttactgatactcgtgccatcgacgaagtaggcctgagcatcgcccaggtcgaagaaatgtatcgctatctcgccattgccaactatgaagatcgttttgttatcccgaccagccatcgggaaatggcgggcgatgccttcgcagaacgcaatggctgcggttttacctttggtgacggttgtcacggctcggacagcaaattcaacctgttcaacagtagccgtatcgatgccatcaacatcaccgaagtgcgcgacaaagcggagggcgaataatgcagatcctcaaagtgatcggcctgttgatggagtatccggacgagatgttgtgggaatgcaaggaggacgcgctggcgttgatccgccgcgatgcgccgatgcttacggatttcacccgcaacctgcttaacgcgccgctgctggataaacaggccgaatggtgcgaagtgtttgaccgcgggcgcaccacgtcgctgctgctgttcgaacatgttcatgccgagtcccgcgatcgcggccaggcaatggtggacctgctggcggagtatgaaaaggtcggcctgcagctggattgtcgggaactgcccgattatctaccgctgtatctggagtatttaagcgtactgcctgacgatcaggcgaaagaaggattgctcaacgttgcgccgatcctcgccctgcttggcggtcgcttaaaacaacgcgaggcaccgtggtacgcgttgtttgatgctctgctgcaactggcgggaagtacactttcaagtgacagtgtcacaaaacaagtaaacagcgaagagcgcgatgacacccgccaggcgcttgatgcagtgtgggaagaggaacaggtgaagtttattgaagataacgccacggcgtgtgacagctcgccgcttaatcaatatcagcgacgctttagtcaggatgtcgcgccgcaatntgtcgacatcagtgcgggaggtgggaaatgattcagtatctgaacgtctttttttacgatatctacccgtacatttgtgcgacggtgtttttcctcggcagctggctgcgctacgactacgggcagtacacctggcgcgcctcctcaagtcagatgctcgataaacgcgggatggtgatatggtcgaatctgttccatatcggcattttggggatcttcttcgggcacctgttcggcatgttaacgccacactggatgtacgcgtggtttttgccagtggcagcgaaacaactaatggcgatggtgctcggtggtatttgcggtgtgttgacgttgattggcggcgcaggactgctgtggcgcaggctgacaaatcagcgcgtgcgtgccacttccactacgccggatatcatcatcatgagcattttgctgatccagtgtctgttggggctaagtaccataccgttctcagcacagtatcctgatggtagcgaaatgatgaagctggtgggttgggcgcaaagcattgtcactttccgtggtggatcgtcagagatgcttaacggtgtagcgttcgtcttccgcctgcatctggtgttgggaatgaccatcttcttgctcttcccattcacccgactggtgcatgtgtggagcgccccgtttgagtactttactcgtcggtatcagattgtgcgctcgcggcgataatttcaccctggccggatagcccttcgctctccggccacttgcaggctatgatagttctccagtcacaggagaacgttaatgaaaccgcaggtttaccacgtcgatgcttttacctctcaaccatttcncggcaattctgccggtgttgttttccccgccgataatcttagcgaagcgcaaatgcagcttatcgcccgcgaattaggtcattcggaaaccgcttttctgctgcacagcgacgacagcgatgtgcgcatccgctactttacgccaacagttgaagtgcctatttgcggtcacgcgacagtagctgcgcactatgtacgtgcgaaggtgttaggtttaggaaattgcacggtctggcaaacatcgctggcaggaaaacatcgcgtgactatcgaaaagcaccacgatggttatcgtatttcgctggaacaaggtacgccaggctttgagccaccgctggaaggtgaaacacgtgcggcgattatcaacgcgcttcatctcactgaggacgatattctgccaggcttgccaattcaggtggcaaccacaggacactcaaaagtgatgatcccactgaaaccggaagtggatatcgacgccctttcgcctgaccttaatgcgctgaccgctatcagcaaacagattggctgcaatggtttcttcccgttccagatccgcccaggcaaaaacgaaaccgatggtcgcatgttctcgcctgcgattggtattgtggaagatccggtgactggcaatgccaatggcccgatgggtgcatggttggtacatcacaacgtattgccccacgatggcaacgtgttgcgtgttaaaggccatcaggggcgcgcattggggcgtgacggtatgattgaagtgacggtgacaattcgtgataaccaaccggaaaaagtcaccatttctggcgcggcggtgattttgtttcatgccgaatgggcaattaaactctgaaaccgttgcctgatgcgcttcgcctgtcaggtctacaaccgggctaatgtatgccggataaggcgtttacgccgcatccggcaacctgacataaattattttcccgcctccgggtgcgtatcaaacgccgccatcaccagcgctaactcatccacggtaaagccatgtttcgcatcatccacgcccagaccaaactgttcttgcatcacagcatataacgacgccacatccggtagatttcgctgctccaccgcgtgcccattttcataatggtaaaatgaaaattggtcagtgtcagcttgccgccgtccggcaaatggcggcacatcagcaaatgatggcgaaaatgcgactgcggccagtgcgccgaccagaaattacccatcacataatcgctttgttgctgctcgcagagatcaaaacggtacatcgactgccagtgctgatgatgattaaactgcaacacccaatcatcaccctcctgcaacaaccgatactctccgtgtggcgtggtctgcacaagatcgggaactaaacgaatcggcgcggttagcgtctgcccaccgaaaccgacatcagcaatccatttttcctcttccagttccaccaacagcaaacgatgggtgcgcggcggtaatgctggcggatttgataacactacccgccctaacaagctgcgaacgttaaaccccagctcgcgtaacacccgctcaaaaacgccattctgctcaaaacagtaaccgccacgacgggctatcaccagtttctcttccagcgattgatcatcaagctgcatttccctcggcagcaaaacgtcgaggttttcaaacggaatggtgcaattgtgtttcaggtgcaatgcacgaagcgtatcaatattgaccgcagcagctcccgaccagttaatacgggcaaaatagtgattcagaatgggcgtcatcaggcgtttcccttagtggttttctcaacttataacctggaatagacgccgcaccggctattttgtgcnntcgcggacatgcatcacgttcgcaaatcgccaatcccgttaatttcgttacttattgcgttacggactacgcttaaaaaaaccttcttcgcgaggcgataccatgagccgattcatccccatagaattacaccatgccagccggctgttaaatcatggcccaactgtcatgatcaccagtttcgatgagcaatcccagcggcgtaacattatggctgcagcctggtcaatgccggtggagtttgaacctccacgcgtgacgattgtggtagataaatcgacatggaccagggagttgattgaacgtaacggtaaatttggcatcgttatcccgggcgttgcagcaactaactggacgtgggcagtgggaagtgtgtcgggtcgtgaagaagataaatttaattgctatggcattccggttgtgagaggcccggtatttggtttgcctctggtcgaggaaaaatgtctggcgtggatggagtgtcgattgctacctgcgacttctgcgcaagaagaatacgacacgctgtttggcgaagtagtatcagcagcggcagacgcacgggtatttgtcgaaggccgctggcagtttgatgatgataagctcaatacgttgcatcatttaggtgctgggacgtttgttaccagcggcaagcgtgttacggcgggttaagcattacatgctgtaaccgggtttctttatcaaagcctccatttggggcgcgatttcggcatcccagatagcttgccaagattctggttgaatctgttgtagagcaatgcttatcgaactgtctttactgttcagatggcgaataataacgtcggtaatatctgcagcaagtgctgctttttgttgttcgtccagttcacgcggataacatttaatgtctatgtgcggcatgattacgctccttttgaaagatgtcagtaaaattaacacacattgtgaatgtcgtgtgtccggtaaagcgtttttacgacaataatgccagggcaagattacgaaagcccgctccccgcaaggactgacgccagatagtttctgtccatggctgcttttcgcatcttacgtcttaaccctgccttgaataccttatcattcgtcaaaatattaatagcaatgtgccgtatccctgaaaataattctgctgcatttcctcttcttattttgcagtcgtcttcattcattaccacgtccagacgccagtgcagcttattctccacgtgccagtggtttcggattgctgtgcgaacttctctgcggttaaatcagcagaactgatataatatctgaccgtcattttttggctctttcttttgttctgctgttctgctgttctgctgttctgctgttatcgaccgaaaggagactgccacgcataatttcttcagccctttccattcaaacgtgaaatcaataagttcatcagggacatcgcaaacaatatgaagacggatttcttctctgccgtgactcttttcactcattgcgtaactgtcatgctctggattatttaattctttcagcggaaatttttcctcaaaggctttatttagccgcccctggtttccttttaccgcgaataaataatcacctccctgtttttgtatcttctctgcaatatctttctggcaacccatcgcatcagttgtgatgatttttcctttaatatccagcatgttaagaagttctgggatagctgtaatctcattagatttctcatccgtcttgatctgtccgatgaccagactgtgcattgttgagaacgcactaatgacatgaatcgctcccctgcggcgactcttgtcataagagtgccggagcgtttttccatcaattgcaatgacgtctttatcatctgaagaatggcagtcacgcatccagttaataaagcactcgtgaaattttgcaggactgatacaggatacaactctggcaatgatatcgtgaacaggaataccattttcaaaatcaccatatcacttcaaaacatcgggatgtgtttccccaaaatcctctatatcttcccagccttctgcaccagaaataacggcacaaatagtcaacagtagaatatccgataatttatgttccantttccaggcttgtctgtaatcggggataatagaaatatgttccatcaattttttaagttccattttgttctccttaattatgtaaggagtatttgatcatgtataagcaataaaaaacagcttcaggtaatgaggaatatctcaatttttaaacataaaatgcgaattatttagtacaaaaagtgaacttttgatgatctttccctaatctcacataggatcagatctcgtctgatcgttccccctgcgctcactaccatggctctttaccacagcagccggggttgtttgggaccgacttccganagcagatcccggtgggcctgccaccatctcttcacaagcttatgcttattacatgcaaaacgtcccgttttgcatctttgtgcctacggcacaccgatgatctttccctgtgatctttccctgaatctgcccctgagaacctgaatcaaacgtctgactcgcagaaccatctgtttctcgcgctctgtagaacttcatgaaaaagtcatcggtgcttttatcgaaaaatacatgttctactaattgaagtcatcatcaaaaaatttaattaatcgaatcatacctataaccttttaattttacttttttgtcttcaacattaaacacaaaaacctcttggacaattctttttgaatattctgagaaatatatcaatgtaatttcatcgtttgaaaataatccgcgagtgattttttcagttttaagggttgattttttataagtcccaagatctttttcttttgcttcgttcattatgtcgataaatttttttcagatgtggcagtctgaaaatcacttgaagtgattttatatatatcactgtatttccctgtctgatataaaccacgaaagatattaacttcttgtctagctggctctatgtccactggagaacaaccatacaataaaaataaaactannnntatatattttttcatatttcctcctgttaattgacccagcattcttgccacgttctacaagccagagtcataactgaagcgtcaacacctgcaccgataccaacagattctgtcgatgattctggattatcaacatccactacataagtatacgcaaaatgccccccaactccgccgccaaccgttacacctactgaattgctgactcccgatgtaggtaaagacttggtctcagaatatgtgatagccgcatttatcccaccaccaattcctgcatgtccgcatgctgtagcataaatacaaatatcagataacatttcacctttctttttagcaaacgcaacgccaagtcctgcatgaccacctaatgatattagatctccactgccagtaatatcaattgatgatgttccatatgaatcatcatgccaaacatcatataataattgatataaattatacaaacccaaaggatccatccttattatcggattcagtgggtaattatacaggttccatccccccgccagcccaatggggtcttgtgtaatatacctcccctgtagcgggtcatagtaccggttccggttatagtacagccctgattcctcatcatgctgctgccccggcagacggtatggctggtgcaggtaatacgggttctcttcattaagctggttgccccattcatcatactccccgcgccacgccgtattgccgtcttcgctgatgagngccagcggcaggccccggtggtcgcagtggtaaaaatgaacttttcgcgccggtgtgtattccggctccacctgtctggccagttgctccaccgtcagcccgcactgcgcaagccacgcccggctttcactgctcacgcggtctgcccggatttcnnnctccagcctgtccagcagccgcaccagttcagccgggaacaccacgccgtggccgttctcactcccttcctgctggagcgtctctgccaggctgcgccgctgcgctttttcccgctcgccgttctctgtctcgacccggatgagcggcgtgaagcttcccggctcgtataccgtctggatacgtgtggtgtcagtctgcaccgtcgtcagcctgtctccgtcccagccataccacgtcacctccggtttacgcgacagcgacatccaccccgtcaggtcacgctcccgccgccagacccgttttgccattcgccgtcccagcgggtcgtagaggtagcggctctcgaccagtggctcgccatgctgtatccgcgtgtagaacaccagrcggtgctggctgtcgtagtggtagtggtgggtccgctcgtcgtccgtccgtatcacacccgccgggatgcggtccgtcttctccgtcagcctgccgtattcatcgtgtcggtagacatagtgcgcatcctccgcgatgcggttatccggccacgccgtgagcgtgctgtccgggtgtagctccgggtccggcagccggtttcccgccgggtcggtcgcatacgggatgcggatatccaggtctgatgcaagggtgngcacgctctccagcctgcccgtggcgctgtagccatattcccacgtctgtcgcgggccgctgatgcgcaccaggtcgccattgtcattccagtcgtagtcacggtcatacacctggctgttcaggcgctggctctgtaaatggcctgcgggagtgtatgtgctggtcagttcgtatgcgttattgccgaagctgcgcaccgtctcgcggtgcagcctgtcgcgcgtgaactccaccagcggcgtcccgcccagcttcatccccgcaagataaccgctgccgtaggtcagccactccacccgcggcaggctgtccggcgtgacgcggtttgccagaccctgttcgttgtatgcgtgctctgtctcatgctgccacagcagttcccccgtctccgggttatgcaccgtctggcgctccccggccaggcggcccttatcatcataaccgtaatgcaccgccacctgatggccttcgctcaggtggctgatttctgtcagccagccgtgctcgtcgtactgccactgctctgccggttcgccgttcaccgtgcggtgagtgaggcggtccgattcgtcgtagtgccagagggtgacaagcccctcatcttcactctgcgtgagttttccggtcaggtcatagtggtaacgttgcgtccgcccgtcaaagccgcgctgctgtaccagccggtcaagcgcatcgtaggtaaactcactccggctgccgttctcgttggtcagcgtggtgatgcgtccggcaaggtcgtattccatactgcgcgtcagcccgccctgcgtggtgctgaccgcctttccccacgcatcgtactgtgtctcgctccggttgccgtccggggtgataacggcagtcaggtcgcctgcggcgttgtactcataccgcgtttcatggccctgtgcgtctttcaccgagattaaccggccacggttgtcatagcggcggtaaaggctgatgccttcctcgcggtggaccgccgtcatctagccgaagcggtcgtattcatagcgggtctggtagcccgagcagtcggtgaacgccagcaactgaccgtagcggctccaggtcatctgccgggtgctgcccgtcgcatctgttgtcgtcgccggtaactcactgtacgcatcatcgtagcggtagcgtactgtctccccgctgcgcgatgtctccgataccagcctgcccggttcatcatatgcccggcggctctccagcccgtccggggacaccaccgccgtcagctggttcccgtcgttatagtaaaatttcgtctcccgcccgtccggtgtggtgatgtccgtgatatcgccggataccacattcagaccatactctgtccgccgtcccgccgcgtccgtctgcgccgttagccttcctgccgcgtcatacccgctgtgcgtgacgctgccgtccgccagttcttttttcaccacccgcttcagcccggccccgccttctgtatgcagcacctcacgccggttcaggctgtccgtgacggtgatgcggtcctgctcatactggtagcggtaactcaggcctgccgggttcagttgctccaccacccgccccgcatcgtcgtagcggtagcgcatctccggccttcccgcataacggtgccccaccatccggcccgggtgctgcgcgtcatacgtgaaagcgcgcacctgcgtattgctgcggtcatataccgccagcagttcaccggcttccgtatacgtgtaccgcaccagtggcgcagcgggcaggctctccgggtatgccgggtcgtgcgtcagccacaccgccgaaaggcggatacctctgtcgggaccgtattcggtaccgggcagtgtgtcggggaacgctgagtctgaaagagggcggggggtgtcaggggaagataaagaagcggtgtgctgtttacgggcctcttccgcccgctgcgcctgcgtggtcagcaccagacggaactcccgcccggcaccgtccgtcacgccggtgatttccccggccaggtcaccggcggcctcacgcctgtacgtcagcgtccgcccgaagcggtccgccatcccggtaagcacccggtacggcggcagnnncgctggcagtacgtcctcagcacccggcacccgctctgaccaccccagtatccaccacggcccctgtgcgctgttggtcgccaggtaaagatgcggnnttaaccggatatccggcggcagcgccccccacagccgnnnnnnnnnnnnnccgtccggctgcgctgccttaccaccgcgcaccagccacattgactcgctgcggctgtacaccgcctcccccggcagcagcggctcaaagtgaatgctccgcccgccgttgtcgttgagtaccagtgcatcatcgcgtagctgtaagcggatatcagaaggcgctttccagccggggccaaaaatccccaccggcgcaggcgtccgggtccggtagctgctgtaggtgcgggagagaatgaacggcagcgggccgggcagcgcaaggtccgtctcgccgggcagcaccttcgcccccagcagcggatttaccgggttgcccgaagtcatcccgcccgggcacaccgagcacgccacgccagnnnnnnnnncaattcttacacctgccgaaccctggacaataggaccgccatactgagtcatatctccctgacgcgccgctggttttccgctcatgattcaattccttcttctgtttatttttaatgcttgtttgttactgaataccgaacaggtacgggatcagtactctctcatatccggcgtatcctgcttttcatcaggggtcttcggtggggatttcgaggctgcacagttccagttaatcaacagtgagtcaccattaacctgctccttaccctgcaaatgaatttttgtgccgttgagaaaaatttgtccgtccttcgtcagcaccagccttgccttaccacagcagagctccagatgctcaccggcggagtaaatcgcggtctgcccggtatcatcctttttcgttttaccaacggtgaaggtaacgttatttccgactttgacgtcataacccagcccgaccctcaacgatttatgcaaaccgatctgcgaggactgcatcagagccaccgaagtgttcataatgccacctaccgtcgtctggtacgccacgcccacggtcagcgcacgaacaagtccaatcgtttccacctgaacagaacccacgttaatgatctggttactgcccaccgtctctatctggttaacgcccaccgtctgtatctgattgttggtaaccgcaatcatctgattgttgccaatggtctcagcatggttgtttatcacatccgtggtgcggttattcagcacctcggtgttcatgttcttctgcgcgtggatgtagacctgttctttccctgtcgcatcgtcaaacttcagttcattaaacccgctgcccttataggttttcgaacgaatggtcatctgcgtcttcgtccccggcaggctgccgggtgtgcggttttcctggtggtaggtacgccccataataatcggctggtccggatcgccgttgaggaagtccacaatcacctnctgacccacacgcggtatcgccaggttgccaaagccggtgcctgcccacgcctgtgccacacggatccagcatgaactgtcctggtttgacgggttatagcggtcccagttaaatttcacccgcacgcgaccatgttcgtcgcagaagatttcctcgcctgccggtcccgtcacgacggcgctctgcgggccatccaccagcggtttcagcaacggctgtggtcgccatgtccggtctgccggtattaccgcaaagtggttantcagcgtggtacctgaacccctgcgtcccggcaccgcctgtggctgctcgccgtgcagttcacttgccaccacctgccattcccggttcaggttcgcctgcggatgccccgtcagcacaattcgccgtcccggccatatttccggagaacggcttgttccgcgcgccacttctgcgttgttgcgccagccatccatctgccagcgggcaaagttctgcccgtgggcacccttgaaacgtccggggtagtcatacacttcatactgtgtgcgctggtaatcctggtactggccttcctgatcaaaacgccctgcccagccgggtcgtttaaaggtgtagtccttggtcaccacggaagaagggcggatttgtgcgctgtagcggaactggctgatgcatagggtgctcacctcggtacgggtgttcgggttccaggggatctcaaaggactccggcagataacgcacggtgtcgcacaggaccaggctctggtcgatacttttttgcgcgtgctcctcataaaagaagatgccttcctccgccgccatccggcacaggaaatcgtaatcagtttcgccgtactggacacaaaactcacgggaaggatgcggctcgctgaacagcggactccactcggtcacaccgttttctttcaggatcgtagcgagtatgctttcgatgtcctcattctggaagatacggaagttctggcgcagccctgtgnnnnnnnnnnnnnngnnacaccnncatgctgtacagcatctggtttttgtcgttctcccccagttcaaaccaggtcaccacacctttcacccggcgctgtacgtcatcgccctgccataccgtcaggtaggccattttgtccagcacctgcgcaaattcaagggaaagaaactgctgactgaccagagaaaggtcgagggaaaaaagtgaagagagtgactggttcagatgaaaggagaccaccgcaaacgcgtccggtggcaggccgtccacttccagcgtgaaacgtaatccggttgacatagcaacctccgtgaaaatgaataataatccgcacatattgcatgtacaacatgtcgggcggatgaaataagtgagtcgacatctggcgttaccggggaatatcagaaaaatgtcatggttatgtgatgatttagtctgggattttacttcagagaaacgggtgtctgtttagtcaacaaaataatcacaaacgcaacggatgggttctcgacgttattcacgacaggctcgtacattacagcgagtaataaaaaacctgatatgcaaagtcaaaccaatattcataatgtctttttattcacaacaataaataatttaataacaatcattgaaatgaatgatgatttgtataaggaatatacgctaccgccccaccctgataacatgatctgcacattgccatcttaacgtcgttaaacactggcttaatagtggatatttcaaattaggaattnnnnnnattcacctgatgaatatcataagcaaatagcatagaaaataatgacaactcccccgaggggaccatttccaaagcactgcaccaccacctggtgcccggatgatcttgcttcagtggtaagagtacctgattcattgttcccaaaatggtgttttcccctgcccctccaataatgtgcagctctcacgtgataatctattgattaggttatattaagaatcaatatttaaaatacatccattttcttgaataaatcaacatgtttattaatcaattgctgttttagctctgactcatcaagctctccatatttgtcctacagataattgcgaataaatacagagaacgccatttatccttttagcatacctgccggatatttttatttgtattaatattaattgcatctccaactccgagcatatccatcattaaaaacattttgagattatagaatacctgtgataacaagtgaaacatctgcacaatgtgaatagttagtttcttttcagaggaaatgaaatagacaagctgaatgaaagggagtgtgatataaattaaaaaacataacatgaatctaattaattacgcacatcattgtggataaagttactgaataataaataacataatcttctggtatcccactcaaataatttcattcctttttagtatttcttgtaacgttggtaactgacatactgcatcagcaatcgcactgatattcgtggcattatcctgaaaccattcatgcccaggcccccatgtgcgcatagtgcaaagataacagtccaccagcgttagttgctcaccaaacgcataaggttcagcggtcaattgtgaattcagccagacataaagcgatttacgatattcaataacattcttctttaactgttcaggtgcgtcagatgcccaacgctcagggtaatcggcgaaagtgaacgttggatagacattagcaaccagccagaccaataaccgttgaaactgctgacgttcggcacgcccaaccggtggcgcaaggtccgggcgacgatcgagaaccatcaatgcaatcgccgctgtctccgtcataatctcgtcattttccagtgccagtgtcggaacctgacacaacgggttcagggttttcaataactcgcgtgaagttccctcgtggtcaaaaccactgacatcaacgaactgataaggaatatcagccagtgttagcatcagctcactgattgtagagccccatccgggtacgccatacaccttaatcatatgcccctcacaatcttttaaagattaaatgtaggacagtacacaggttaaccagcaaaaggatttgtcattttttcgtcagttgtattaatccccttcaggattgtaaggggatgttttgcatcgtttatcgataacgggtaggatgctgcgccgatagttttatacccataaagaataatggtgataactatcatcgccaggatgaataaacattgttcatggcaacttatatgactttttcattaaagcaatcagggagagcaatgagtaaacacgacaccgacacttcagatcaacacgccgcgaaacgccgctggcttaatgcccacgaagaggggtatcacaaagcgatgggcaatcgccaggtacagatgatcgccattggcggcgcgattggcaccggcttgtttttaggtgcaggagcccgactgcaaatggcgggtccagcactggcactggtttatttaatttgtggcttgttttcgttttttattctgcgtgcattgggtgagctggtgctacaccgcccttccagtggcagttttgtctcttatgcccgtgagtttttgggtgagaaagccgcttatgttgctggctggatgtacttcatcaactgggcgatgacggggattgttgatattaccgccgtcgctctgtatatgcattactggggtgcgtttggcggcgtgccgcagtgggtctttgcgctcgctgcacttaccatcgttggcaccatgaatatgatcggtgtgaaatggtttgcggagatggagttctggtttgcgcttattaaagtgctcgccattgtgacctttttggtcgtgggtacggtgttcctcggtagtggtcagccgctggatggcaacaccactggctttcatttaatcaccgataatggcggcttcttcccccacggtttgctgcctgcgctggtgttgattcagggcgtagtgtttgcttttgcctccattgaaatggtgggtacagctgccggagaatgtaaagatccgcagaccatggtgcctaaagcgattaacagtgtgatttggcgtattggcctgttttacgtcggctccgtagtgttgctggttatgttattgccgtggagcgcgtatcaggcggggcaaagtccgttcgtgacgtttttctctaaactgggtgtgccatatatcggcagcattatgaacattgtggtgctgaccgctgccctctccagcctgaattcaggtctgtactgcaccggacgtattctgcgctcaatggcgatgggcggttccgcaccgagttttatggcgaaaatgagtcgtcagcatgtgccgtatgccgggattctggcgacactggttgtgtatgtcgtcggcgtattcctcaactatctggtgccgtcgcgcgtatttgagattgtgttgaacttcgcgtcgctgggaatcatcgcttcatgggcgtttatcatcgtgtgccagatgcgcctgcgtaaagcgattaaagaaggcaaagcagcggatgtcagttttaaactgcctnnnnngcccttcacttcctggctgacattactgtttttactgagtgtccttgtgctgatggcgttcgattacccgaacgggacttatactatcgcggcgctgccgattatcggtattctgctggttataggctggtttggtgtgcgcaaacgcgttgctgaaattcacagcactgcgccagtcgtcgaggaagatgaagaaaaacaggaaattgtgtttaagcctgaaacggcgagctaattgcaaaattgcccggctacgtgnnnngcaaatttagattactgacgaaggtgtgccgcatgcggcgtgatcaaagtcaggcaagtctctccgttatcaccctcgccatatctattacagcgcaatacgaatcacatcgtctggctgggtagcttcctgctgtttagtggatttttgtttcacactgacatacagcgttttgccatcggcagacagcgccaggctgttcggatgagtcggcgtatcgaacgttttcaccactttatagcttttcgcgtcaatcacactgactttacctgcctgacgatgcgttacgtaggcttcattacgcgctgggttaaacagcacagccagtgattccggtgccgcaaccttcgccagaatattgccattacgggtatcgaccactaacacttctgccgctttagaatcggtgataaatgcacgctgcctggcggtatcaaggctgatgttgataaagaagtgctctttgccgtcatccagcagctttttacggctgaggattttattgtcggcggtgtcgatggtaatcaattcgccgtcagcgttagtggtgtaaagacgtttgcctttgctatccagtgccagaccggtactcattttaccggtgttctggatggcggttttcagtttgatattctcgccatcaacgacccaaatcacgctatctttaccaataccactgatgtaaacggtgttcgtggcatcatcagctaccagctcacgcggttgcagcgggcgcacctcttccgtgcgcttacgatcatccagcaccagacggcctttcacctcgccagttttggcatctatcgccgtgaccgcgctgtttacggtgttaccaaaccacaacgtctgagtcgtgttattgatggtggcaccaaacggcttgagatcgttatggatcgcctgcgtcacttccagagtgaccggatcaagacgataaaccacgccgcctttatccagtttgcggctttgcgaagtggcgagccacagcgcgttttcttgctggctataagccatttcgtaggcacctttacctaccgctttacgcagcatttcttctgcggcctgcgtactgaatgatgaagcaacaagcaatgaacctaacagtaatgaaccacgcaggcgcaatgaaaacagatgacgtaaatgcatgacgactccctttgatgaaccgatatttttgctgcttcacaatgcttcgctaagcgtaatcatcgttacgctcttgttataaatgggaatggtaatcattatttactcaaatgtggagcatttcttgccgttacgactacaattctctcaattaattaacgtatcgtgccgtttcgttttccataaatttacaatttcattaccatgacggtgttttcccattcttaacctggcttttttcatgaagattgttttcgttcgacagaccgttttgcccgccctgcttgtcctttcccccgttgtttttgccgctgatgaacagaccatgattgtcagtgccgcgccgcaggtggtttcagaactggatacccctgcagcagtaagcgtggtggatggcgaggagatgcgcctggcaacaccgcgcattaacttgtccgaatcactgaccggcgtgcctggtttgcaggtacaaaaccggcagaactatgcgcaagatttacagctgtcgattcgtggatttggctcccgctccacttacggaattcgcggtattcgcctgtatgtggacggtattcccgntaccatgcccgacgggcaagggcaaacatccaacatcgatttaagcagtgtgcaaaatgtggaagtgctgcgtggccccttctctgccctgtatggcaacgcgtctggcggtgtaatgaatgtcaccacccagaccgggcaacagccaccaaccattgaagccagtagttactacggcagttttggcagctggcgctatgggctgaaagcaacgggcgcaacgggagacggcacacagcctggcgatgttgattacaccgtctcaaccacgcgttttacgacccacggctatcgtgaccatagtggcgcacagaaaaatttagctaatgccaaactgggcgtacgcattgatgacgccagcaaattaagcctgattttcaatagcgtggatatcaaagcagatgacccaggtgggctaaccaaagcagaatggaaagcgaatccgcaacaagcgcntcgtgcagaacagtacgacacgcgaaaaaccatcaagcaaactcaggctgggttgcgctatgaacgtagcctgagttcgcgggatgatatgagtgtgatgatgtatgccggagagcgagaaacgacccagtaccagtcaatacccatggcaccacaacttaacccgtcacatgcgggcagcgtgattaccctgcaacgccattaccagggaatagacagccgctggacacaccgtggtgaactgggcgttccggtcacgttcactaccggcctgaactacgaaaacatgagtgaaaaccgcaagggctacaataacttccgcctgaatagcggcatgccggagtacgggcaaaaaggtgagttgnnnnnnnnnnnacgcaatctgatgtggaacatcgatccctatttacagacgcagtggcagctgagcgaaaaactgtcgctggatgctggcgtgcgctacagctccgtgtggtttgattccaacgaccattacgttactccgggtaacggcgatgacagcggtgatgccagttatcacaaatggctaccagccggatcgttaaaatatgcaatgaccgatgcctggaatatctatctggcagccgggcgtggttttgaaacgccgacgattaatgagctgtcttatcgcgctgatgggcaaagcggtatgaactttggtttaaaaccatccaccaacgatacaattgagatcggcagtaaaacgcgtattggtgatgggctgcttagtctcgcattgttccagaccgacaccgatgatgaaattgttgtcgatagcagtagcggtgggcgtacgacttacaaaaatgctggaaagacccgtcgtcaaggcgctgaactggcatgggatcaacgtttcgcgggagattttcgcgtaaacgcgtcctggacctggcttgatgcgacctatcgcagcaatgtttgcaacgaacaggattgtaacggtaatcggatgccagggatcgcccgtaatatgggctttgcgtcgataggttatgtaccggaagatggttggtatgcaggcatggaagcgcgttatatgggcgatattatggcagatgatgaaaatacggccaaagcgccgtcttatactctcgtcggcttattcaccgggtataaatacaattaccacaatttaactgtggatttgtttggtcgtgtcgataatttattcgataaagaatacgttggttctgtcattgtcaatgagtcaaacgggcgatattacgaacctgcgcccgggcgaaattatggtgtcggcgtgaatatcgcatggcgatttgagtaattaccttgatgcccggtatttgccgggcatttactttaacgattgtattgctggtataaaatagcaatattttgttgcataatttcagcaagacaatgtctgcatccctctttgtcttttgcttttaacgcagcgagtaacagatgatagttttctatatgctcccgtaattccgctggattaatcgcttcatagagataatgtaaaccaggtcccatcctgacccacagttgctcaatcatctcacacaggatgggcatatttgagcgatgataaatcgctaagcgaaatagcctgtttacattaatgatttgttccatgtcgcccttttcttgcgcctgctgtaatttctcgagcaattcctggagttccgccaggtcttgcggggtgaggttttcaacagccagagcaactgccattaattccagttcgtagcggatccgattgatttcgtctaattgacgtttccccacttccggaactgtaaatgcttgcgctggtgcgacagaaagcgcattcaccgaaaccagacgtaataatgcttcacgcacaggtgtaatactcatacctaattgctccgccagatttttagtaatcaggcgtgcgccaggttttagtgcgccaatactaagctgatgtttcaggtcgttctcaacctgcagagtcaaactgacatgtttcattttttccgttccaggcattttaattccttcgcgtgttttctgtccaaccctgcctgcatggcagaaggaattcacctggtgtattaaagtgaataatcataaaccactcacctttgttgttattagcagcagaacaatgatgtggttagttaattaaagctgaaaataagctttttgcctggatttttatggcggcttacgccgccgttgaaactttaatcatcacccgccacgcggatcaccactttgccgaagtttttacccttcagcaggccgataaacgtctgtggcgcattctctaaaccgtcagtaatttcttcgcggtagtggattttatcctctttcacccattgccccatctccctctgaaactcatggatgcggtgaccataatcctgagcgataataaaaccttgcaagcgaatacgttttttcagcactgtagccatcaacagaggtaaacgatccggaccgggtggtagctctgtagcgttatagctgctcactaatccgcagacgggaatgcgcgcagatgtattaagtaacggtagcaccgcatcgaataccttaccgcccacgttttcataatagatatcaataccttttgggcacgctttcgccagttgttcggcaaaatcatccgcgtggtgatcaagacaaacatcgaagcctaacacctcggtagcatggcggcatttttccgcgccaccggctacccccaccactctgcaacctttaagtttgccgatttgccccaccgtcgcccccactggtcctgtcgccgcagctaccaccaacgtttcgccctctttaggctgaccgatatccagtaggcccatataagcggtaaagcctggcatccctagcacacccagcgaccacgatggattttgcggatgatcgccaagtttcaccagatcatcaccactggatatgtcatagtcttgccatccactgtagcccagcacccagtcgccagactgataatcaggatgattcgactccacgacacggctcaccgtaccgccgaccatcacgccgccaatatcaaccggcggtgaataagatggctcatcgctcatacgtccacgcatatacgggtccagggacaaataaactgtgcgcagtaacacctgtccttcacccggtgtggcgacatcatcttcttcaagacggaaattctccggaaccggtgcgccatgtggacgcgaggccagaacccaacgtcgattacgctgcttttgttgccccataatgctctcctgtgcttttggcatgaatccatcaatagtagcaggctcgcaggattggttttgtttgcagccgtcaccccccctctgcaacacgcaataatttcatcgaggaatccgttgcttcgggctgttttcgatagtattgataacatcatcatcattattttattgaggccagacatgtccatccgttttgcccgcaaagccgactgtgctgccattgcggaaatttataaccacgccgtgttgtatacggcggctatctggaatgaccaaacggtggatgcagataaccgcattgcctggtttgaagcgcggaccatagcaggttatccggtgctggtaagtgaagaagatggcgtagtgacgggatatgcctcatttggcgactggcgtagtttcgatggttttcgccataccgtggaacattcggtttatgtccatcccgatcatcagggcaaaggtctggggcgtaaattgttaagccgattgattgatgaagcgcgagattgcgggaagcatgtcatggtcgccgggatcgaatcgcaaaatcaggcctcgctgcatctgcaccagtcgctgggatttgtcgtcaccgcacaaatgccgcaggtgggcactaaatttgggcgctggctggatctgacatttatgcagttgcaactcgacgaacgcactgaaccggacgcgattggatgaatcagtcgctcacccttgcctttttgattgccgccggaattggtctggtagtccagaacacgctgatggtgcgcatcacccagacctcctctaccattctcatcgccatgttgctgaactcactggtggggattgtgctctttgtttctattttatggtttaaacaaggtatggcggggtttggcgaactggtgtccagcgtgcgctggtggacacttatacctggcttgctgggatcgttttttgtcttcgccagtatcagcggatatcagaatgtgggagcggcgacaactattgcagtactggtcgccagccagctgattggcggtctggttctggatatcttccgcagtcatggcgtaccactacgggcgttgttcggcccaatttgtggcgcaattttacttgtggttggcgcctggttggtagccagacgctcattttaatcacaggatggtgccgcctttggttaactgttcatggcgcgcttccatatcttctttatgcttgcgaccgtgatgagcaatagcggtgcgcaaacgctgctgctgggtgtagcgatcttcccgacttaactccgcgtcatcgctcagggcgattaataattcgttcatatgggcaatgacgctctcttcaatcgcggcatccacgcgcgcgatgacttcatccagatgcgacatactttctccttagccacttgtgaaatttatcgattcatccaaatgatataagtctgcgtggtgccgtcaagccagtgagtaagatttaaaacagtgaaaacaacagcgccaccgggaaactcatcggccatgttgcccccaccagaaaggcgcttaagaaacggatgcgtttcttatcgtgagaaagaaaccaagtgataagaaatgcgattgctgccataaccgcataaaaaacaagcatgtgttgatagagagacatgtacgggcgtccagccagatgaataaaacgcgcgcaaatatgcgtcattttttgacgtgcatcaagttttttaaccggtttgagaaaaaaacatcaaacagcaacttgcccttatccatcttcagaatgagtattattgcggattttcttaacccgtactatacacataggggcaatgataaaaggtggcaaaaatgaatgtttccagtagaactgtagtactgataaatgtctttgctgctgttggtttgtttactcttatctctatgagatttggctggtttatttgatgtagtgattttgcacgcagcacgtactgtcagagaaatcagtgctctgacagtacgcaagatcatctcatactcttacgatctgcaatattatccttaatgtttaaccatgacgtggcggacgacggtgtaatcctccagcccataaagtgacatatccttgccgtaaccagaaagtttctgcccaccgtgcggcatttcacttaccagcatgaaatgggtattgacccaggtacaaccatattgcagccgtgcactgacgcgatgcgccctgcccacatctttcgtccataccgaagatgcaagtccgtactggctgtcattcgcccagtttaccacctgttcttcgttgtcgaagagcgtaacactcactactggaccaaatacctctttttgcacgatggcatcgtcctgtaatgcgccagccagcagcgtcggcgcatagtaatagccattacccttgcgcttttcaccgccagtgatcactttgatgtgccctgtcgctttcgcctcttctactgccttgctgacgcgttcgagatgcgccagcgagcttaaaggtccaagctccgtagactcgtcatccggcgcaccagattttaacgttgccactgcagcaccgagtttttccaccagcgtatcgtaaatgcctttttgcgcgtagatccgacaagccgcagtacaatcctgtccggcattgtaatagccaaatgtacgtacaccttcgaccactgcttcaatatccgcatcatcaaaaacaatcactggcgctttgccaccaagttccatatgagtacgcttaatggagggcgcggtatggctgatgatgtgctcgccggtggcgatagagcccgtcagcgacaccatccgcactttgggatgaccggtcagcggatcgcccaccgttttgcctctgccaaacagtacgttaatcacgcctgccgggaagatatctttcgccagctctgccaacttcaacgcggtcagcggggtaatttctgatggtttaagcactacgcagttccctgccgccagcgccggagccagtttccacgctgccatcatcagcggataattccacggtgcgatagaagccacgacccccaacggatcgcgacggatcatcgaagtatgaccttcaagatattcacctgccgccagaccattcagacagcgcgccgcacccgcgaaaaagcgaaaaacatcgacaatcgccgggatttcatcattgaacgcactatgcagcggtttgccacaattacgggactccagttcggcaaaaacctgaccattttcttcgataacatcagccagtttcagcagacattccgcacgcactttcggcgtggtttgcccccattcggcaaatgctgcatctgccgcgcgcacagcagcatcgacctgctctgcggatgcctcggcaatctccagtaaaacgtcccccgttgccggattatagacaggctgtttttccccttcgccgctaaccagttctccgttaatcagtaacttatgttgcatagcatattcctgtatcagtggttattgaccattgtcgccttcgcgggttagcccncagnnncccaggatcggcaaggttgttaccaacataaccagcagtgccaccacgttagttaccggtacatcacgcggtcgcccaagctgattgagcaaccacaacggtaacgttcgttcatgacctgccgtaaaggtcgtaacgatgatttcatcgaacgacaaggcaaacgccagcattcctcctgccagtaacgccgaactgagattcggcaacactacgtagcggaaggtttgccagccattggccccaagatccattgacgcctcaaccagactccatgaggtgcggcgaaaacgggcgatgacattgttaaacaccacaactacacaaaaagtcgcatgaccgaccacgatggtgaaaaatcccggctccagattgatggttttaaaggcggttaataacgccagaccagtgacaatgcccggcagcgcaatgggcagcagcagtaacagcgaaatggcgtttttgccgaaaaagtctcgtcgccacagcgcggcagctgccagcgtccctaacaccagcgccattaatgtcnnnnnnnnnnnnactttaagtgacagtgtcacggcatcaagaatatcactacgctgtgctgccacgctaaaccagcgcagcgtcaggccctgcggtggaaaactaaacgccgcatcttcagtgttaaacgcataggcggcgattatcaggatgggaaaatgtaggaaaacaacgccgccccaggccgccagtttgaggaaaaacggtgcgcgttcagagtgcatcaaacgctcccagacgtttcacgaacgccaggtacagtgcgataagaacaatcggcaccagggtgaatgccgccgccatcggcatattgccaatcgccccctgctgggaataaaccatattgccgataaaatatcctggcgggccaaccagctgcgggacgataaaatcgcccagtgtgagtgagaaggtaaagatagagccagcggcaatacccgggatcgccagcggcaacaccacatagcgaaaggtttgtcgtggacgtgcgccgagatcagctgacgcctgcaacaatgacggcggcaaacgctcaagcgccgcctgcacgggcaggatcatgaacggcagccagatatagagaaacaccagaaagcgccccagcccggaagttgacagcgtattgccgcccaccgcaggtaatgtaaggaacgctgtcagcagtggttccagcccaagatgttgtaaaaaccactgagccacgccatcttttgccagcaataacgtccaggcataggctttaacaatgtagctcgcccacatcggcaacattaccgcaatataaaaaaacgctttcattttcccgctggtatagcgcgccatataccacgccattggaaaagccagaatggcgctggcgatagtgactgccacagccatagtcagcgtgcggagaatgatgtcgtaattcgccggattaaacagcgcacggatgttcgccagcgtcagttccggcgttaccgacatggtgaaatcgtcaaaggtataaaagccctgccataacagcgttagcagcgagccgaaatagacaatgccaaaccacattagcgggccaagcagcagcaaaaacagccccagccccggattccgccagaagaaaccggacaccttacccagacctggacgtgaaggtgattgcaatacgttcatcgccattcacctctcctcaaccagcggcaccatcacatcacgcgaccaggaaaccatcacctgttgtccgggcgtgagcgtggcaggcagttcttcgcctgtcatattggcctgactcaccagcagtttttcaccgccgttcaatttcagttcaaaacgagttgccgcgccctgatattgcaccgcctggatcgtgccattggcctgcagttcaccaggggtgttgaggcggatatgttccggccgcagggcgaagcttcccgtcatgccacaaagtttctctgccatcagtccatcaaaaacattcgatgtaccaacgaacccggcaacaaacggcgtgcgcnggcgcatatagagatcgcgcggggaatcgacctgctcaatgcgtccattattgaaaaccgccacacgatcggacatcgataacgcttcgccctgatcgtgggtaacgcagataaaagtgataccgagagactgttgcagttttttcagctcaagctgcatctgctcacgcaatttgagatccagtgcgccgagcggttcatccaacagcaatacgcgcggttcattcaccaatgctctggcgatagcaacccgctggcgctgaccaccagaaagttgtgacggtttacgttgctgtacaaaccccaacgccactttctccagcgcctcttgcgccattgcgtgccgctgctttttattcacgcctttgaccatcagcccataggcgacattgtcaagaatcgacatatgcggaaatagcgcgtagtcctgaaagacagtattcacgtcccgctcccacggtggcagattgctggcgggtttaccaaagatagagatagccccgccggaaagctgttcgaagccagcaatcaggcgcaggcaggtggttttgccggagccggacggccccagcatagagaagaactcaccatcttttatcgcaatactgacgccatctactgcgcgcacgtcaccgtacaaccgcgagacgttgtcaaactccactgcgtacgtcataaagcaccccagcgaagttagcgaccgcccataatggcaatgtaatcctgcgtccagcgactgtagggaacaaacttgcccccttctgctataggcgttttccagaaggctattttatcgaaatagttaaaaccgtttgtttcacaacctttctcgcctaataacgaactggctttacacccttccggcacgactggtaacgagccaaaccaggccgccacatcgccctgcacttttggcgttaatgaccagttcatccatttgtaggcgcaaaccggatgtttcgcttcgctatgtagcatggtggtgtcagcccaaccggtaacgccctccttcgggaaaacggtagcgacaggctgaccttcggctttcagggcgttggtctgatagggccaggcactggaagcgaccacaccctcgtttttgaaatcgctcatttgcacggtagtgtcatgccagtagcgatggatcaaactatgttgatcacgcagcactttcagcaccgcctggtactgttcttcggtgagttgatacggatcgctgatgcccaactgcggctgagtggctttaacgaacaacgcagcgtccgcaatgtagatagggccatcataagcctgaacgcggcctttattgctcttgccgtcctgcagattttgctcaacaaaaaccacttgccagctatccggcggcgtcgggaaggttttagtgttgtacatcagcaggttcggcccccattggtaaggtgtgccgtaaactttgccgccaacgttaaaccagtcgcctttaaccacgcgcggatcaagcgttttccagttgggaatcaaggcggtattaatcggctgcacgcgtttacccataatcaaacgcagcgaggcatcgccggatgccgtaaccagatcgtaaccccctttggtcatcagactgaccatctcatcggaagtcgcggcggttttaacattcaccgcgcagcctgtctctttttcgaattgcgttacccagtcgtattgtttatcagtttgtccgcgttcgatatatcccggccaggcgataatatccagtcgcccttccggtttatctaaattggtaggcggttcggcggcgtgagcggtcattattgtcatgctgagcgcacacaggctgctgcgggcaaatgtcttgctcataaggtcttactcctgtcgtaattaattgttcagccgccgtgccgtaaaaatatctccttgtttaaccatagacggcggcttgcaggcacaccttcgcccctgagaaaatttaatcaggttgtgagctaccgcgcattatgccgtctgtaaggttatcttctggagtatagacaaggagttaggaaatatgactgctattcgaaattcatattacccaatctaagaggaattaaattaaacgctattacagccgttcttgaataagtttgcctaattgttttaccgcctgttcttcacgttctccccacagccacgcggtattaaaacgaaaaaaacgtgaccagttttcaccggtagaaaacattttacctggcgcaatactgatatgatgcgtcagtgccgccaggctcaattcgccggcatctaacggctcggggagctccagccagagaaaataaccgctgtcattatgatgaattttcacttccgcaggcagataacgcagcagtgcctgccaggcacgttgtttacgttccgcaagctggcgacgcaggcgacgaanatgggcgtcgtatcggcgcgtggaaaggtaatccaccagcgcaagctgcatcggtgagctggtggaaagcgtactcatcagctgcaagcgttgaattttacgtgcatgttttccggcggcgacccaaccaatacgaaaaccaggcaccagacatttcgaaaacgaagagcaatgcaaaacgccatcgtggcgatcccacgctttcgcaggcagcggtttttcccgtccaaaataaagttcgctgtaaacgtcatcttcaatcagcgttacgttgtactgattgagcaacgccaccagttgtgcttttttttgcggcgttaaggtaaatccgagtggattctggctattagtcatcagccagcacgctttcaccggatactcctgcaacgccagttccagcgcctgaagatcgatcccttctttaacatccgtcgccaccgataacgccttcagccgtagccgctccagcgcctgcaacgcaccgtagaaacaaggattctctactatcacccaatcgcccggttcagttaccgcttgcaaactgaggtttaatgcctctaacgccccggcagtgatgacaatttcatcaggagaaatggtgatcccctgtaaggcatagcgacgggcaatagcctgacgcagttctgcgtttcctggcggcaagttttcaatcacgctcatcgccgtggcggttttgcttacctgcgccagcgagcggtttagttgttggagggggaaaagtcgcgggtcgggaaaggccgaggcaaacggaacgaccgacggatcgcgactggcctgcaacatatcaaaaatataagtgttgatatcgactgcttcatctcgagtgactggaatgactggcactttcggcatttttattgcctgtggcgcaacgtaataacccgactgcggtcgtgcgataatatatccctgactttcgagcaactgataggcatggctgacagtcataaagctcatgccagaaagcgccacctggtcacgcaacgaaggtaaacgatcgccgggttgccagatacccgacgcaatctgctcgcgtaattgttctgcaagctgctggtattttttcattatcgaatcgtaattatgtgcagatgattcggcagtctatatcagttgttaaaaatgacaacttttcgttaactgtaattaaaccatcaccagcgataactctttgccaagcgcctttnccgcgagctggactgcgtcgatttttgtcgcatgatgcaagttaaataggcgagtaatctcttgtttaggtttgccaattcgcctggctaactcttgctgagtgatttctgactgtaaaaaagcatttaacagcaataccttagaggcgacgctcaaaggtacttcaataaagtgatcatgactatttaatggcgaaggtaaagggataagctcgttatcttcaaaataaaaatcaaatgcggtcagtaaagcatcttttgccgcttccatcgcttcagcgacagtttcgccctgcgtcaacgcttcagggatatccacaaaagaaaccatataaccgccttccggcgcgggtgtaagagtgacgggataacgcataatttcgactgtctctcgcatgtcattaacctttttaattggcgattaactcaaaccgagttgtttcaggattgctttacgcaatggttctttaatctcatcgcaggggtgacgcggcatgacactgcncctcccatgaaacctgagtttcaaatggttgctgccattcgctacatcgacgccctgagattcgagccaacgtctgaactcgctttgtttcacatcgcctccctgcggctgagtatatcaacaaagtaaacattagtgtttacctccgtgtgtaatttgctcgaaaatagcactaaatcgccgcaacggcagaatgcaatgcaaaatcaggaaggaagattccagaatttctttgcgctaatttgcaaaactgaataataacctcaagaaacgatcggcatcatagcggcaaaaggtaanaaaaaggtggcaggatgtttacnaangcgttatcggttgtcttattaacgtgtgcgctgttctcaggacaactcatggcagggcacaaaggacatgaatttgtgtgggtaaagaatgtggatcatcagctgcgtcatgaagcggacagcgatgaattgcgtgctgtggcggaagagtcggcggaaggtttgcgcgagcatttttactggcaaaaatcgcgcaaaccagaagcgggacaacgttgagtcgtttgatgccggatgcggcgtaacgccttacccggcaggcaatatcatgcagattcaataagttgtgagtaaccagaaaactggcgttttacccttttcgcttcggcaatgttttcagcagctcatccggacttacggatgccactacgcttcccggtaacggcattttcagtatgtgatttttgattttgccaatgacgtgcatctcgcatgggcggcaatcaaactttagcgttaatacttcatcgccgttaaccagttgcattggcgtcgccttccagcttttgatattgcctttcgcctgtttcgggcacagattaaaggcaaagcgcagacaatgcttggtgatcatcaccgggacttcgcccttctcttcatgtgcctcatacgccgcgtcaatcagctgcacaccatagcgatgataaaattcacgcgctttctggttgtaaacgttcgcgaggaaactcagatgtgtttgcggataaaccggcgcaggatcagcaaccggtttacggctgccgcgctggtaactggcaagacgcgcagcatccagcatgtcggcagcttcacggcggaactggtttaacagactgtttggtacaaacagcgcccccggcaaattaatttgcacatcgcgggcgtaatagagggtttgccccagttttgccagaccatccttcagattgttcattgctttttctgcgttattggcttcgtcgaactgcccatccagcgtatgcgttatgctgaccccctcttcactggtgagagtcagaatcaattgttcctgccaaccgcccagttcaatgtctaccgccacccgacgttcgctggaggtttttgtcagtgcctgctgccagttatgatcaagattacggtttagtgggtgatgcgggcgaattttgtgcaaatctgctggcatttcattgggccagacgcggtactgattttctccggttttctcgaccgtattggcacgaaaaccgacgacttcacgtttaatcaacacgttcaggccatcgccatttgccagtggctcggtaacggcaacatcgagatgatctttcgccactttcactacttcacctaccggcaggccgataaatttcggcgaatcgaacgcgccaatatcgcctttacgggcattcacaaaataatctgtgctaccacggtggaaagtcttttccgtcgatggaacaaagaaatgttcagtacgacctgatgaagcgcgcgccagatcgccacgttcttcaataatggcatcaagcatctggcgataatgggcggtgatattcttcacgtagctcatatctttgtaacgcccttcaatcttgaaggaacgtacgccagcatcaatcagcgcgccgaggttggcagtctgatcgttatctttcatcgacagcagatgtttttcataggaaaccacccgcccctgatcgtctttcaatgtgtatggcaaacggcacgcttgcgagcaatcgccacggttggcgctacgccctgtttgcgcatgagaaatgtagcactgacccgaataggccacgcacagtgcgccatgaataaagaattcaatggtcgcgtccgtggcctggtgaatcgcgcggatctgatcaagattcagctctcgcgccagcacaatctgcgtgaagccaacatcagagaggaacttcgctttttctactgtacgaatgtcgcactgcgtactggcgtgcagttcaatcggcggaatatcaagttccagaatccccatatcctgaacaatcagcgcatcgacaccggtctggtagaggtcagtaatcagccgttgcgcgggttccagctcatcatcatgcaaaatggtgttaagcgtgacgaaaatttttgcaccataacgatgggcaaacggcaccagctcggcaatatctttcaggctattactggcattatgacgggcaccaaaaccagggccgccgatataaacagcatcggcaccgtgcaaaatagcttcgcgggcaatggcggcatcgcgtgccgggcttaacagttcaagtcgatgagaagatacggtcacattcttatccagtagctgaaaaatggcnnnnnntttagccacaagcgcgacgttgcgaaatagttttcccgcttaactgcgcgggtaatggatgagggaatgaaaatgtacggtttgctccccaccattacgatagatatgcgtgacgtctgcagcaaatcgaacgccttccccacaattaagggtctgccattcaccatcaacgcacagatcaagttgtccatcaatgacgacgacatgttcgattacccccttctcatggggcgtcgattcgcttattgcaccgggtgccatctgaatcgagaagtgttcaaagcagagttgtggatcataaggaaacagcgaaatgatcaccatcgcctgctgttgtggatcataaactgaaggcgtagcggactgtggcggagaaataaatgtcgaaaatggcacgttcaacccagtggcaattttccataatgtcgcgaccgtcgggctggactcattacgctcaatctgtcctaacattgctttagaaacgcccgtcgcttctgccagtcgcgaaagactccagccgcgctgctgacgtagttgtttaagtgtggtggataaaaagcgagcgagattttccatgcgactcctccggcaaaacggaagtttatcacttgtgcgttataacggacaaatgctacggtgcctgtacgctataacgcacgaggtgactatgcgtctgttttctgttcctccacccacgctactggcggggtttctggcggtattaattggctacgccagttcagcggcaataatctggcaagcagcgattgtcgccggagccaccactgcacaaatctctggctggatgacggcgctggggctggcaatgggcgtcagtacgctgactctgacattatggtatcgcgtacctgttctcaccgcatggtcaacgcctggcgcggctttgttggtcaccggattgcagggactaacacttaacgaagccatcggcgtttttattgtcaccaacgcgttaatagtcctctgcggcataacgggactctttgctcgtctgatgcgcattattccgcactcgcttgcggcagcaatgcttgccgggattttattacgctttggtttacaggcgtttgccagtctggacggtcaatttacgttgtgtggaagtatgttgctggtatggctggcaaccaaggccgttgcgccgcgctatgcggtaattgccgcgatgattattgggatcgtgatcgttatcgcgcaaggtgacgttgtcacaactgatgttgtctttaaacccgttctccccacttatattacccctgatttttcgtttgctcacagcctgagcgttgcactccccctttttctggtgacgatggcatcgcaaaacgcaccgggtatcgcagcaatgaaagcagccgggtattcggctcctgtttcgccgttgattgtgtttactggattgctggcactggttttttcccctttcggcgtttattccgtcggtattgcggcaatcaccgcggctatttgccaaagcccggaagcgcatccggataaagatcaacgttggctggcagctgccgttgcaggcattttctatttgctcgcaggtctgtttggtagtgccattaccgggatgatggctgccctgcccgtaagttggatccagatgctggcaggtctggcgctgttgagtaccattggcggcagtttgtatcaggcgctgcataatgagcgtgagcgcgacgcggcggtggtggcatttctggtaacggcaagtggattgacgctggtcgggattggttctgcgttttggggattaattgccggaggcgtttgttacgtggtgttgaatttaatcgctgacagaaaccgataataaaaagnncnntctaacgatggcgcgtctggaactactttttgttaacgtcaaacatggtggcatcggtcgccatgtcatcaataacttgtttaatattttcgaaagccattggcgtactttcgttattcaggtctttaccttcgccctgacgaacgactttgataaccggtttattagtcgctgcatcaatcagctcaccttcaaaatacaagcgagtatccatggtacggtggcctgtagccatttgcgtccccgcaaccactaatgcaacaggaaccacttcatagaattgcagcccttctttgctggtatctacaccggtaatggccccacggaaaatcagactacgcggccccgcggtggtaaccagtggtttacgctgcgctatcgcttctttcatttcggtgttggtatagttcaaaattttatccagaactttctgccctacctgggtcgaaggtttcggtaccggataataagtgattgggttccagacgatgctgtcatatttgctttgatcaaaactcgggtctacccaacgtaaaaccggtttacctgtagccgaggttgtttcttttaaatcagagtaattgtttaaaaaaccagaatatttatctggctgggtgattttagaggcacaaccagacagagccaacaagccgcataaagctgcaactttcgcaaatgatgtggtacgcatgaatagtttcctgagatgattatattactttttaagttatagcaaaaagcgccgcttcgtgttgtggcaaaaaaagtgttggtgaaaataaatnnnnnnagccccttttcagacgacatagtcaatgccgcaaaaggggctaagtcaatcatcagtagttaaatttcagtaagttaagctgctaaaaaaacttcgactactgtgattaatttcacatcccttcgataaaaaatatgcttaccgaaaagaaggacagtaaaccatctcagcggtggggaattttcacgcgctttgttcttaccgggtcattttttacgtgccagcatcgtggcgaaacgcagtttaatacgattaccgttggcgtcggtgcggtgcagctcgccgacgtcttcattgtatttcaccatctcccagccttcgtaatatcgacgtaattctccctctttgaaggcaaacgggaagccgacggtacatggataatcagcggtatccatcgccgccacaatcaggttgtaaccgccaggtttagtgcaacgttgcatattggcaatcagccctgggatggttttagcctcaaggaacatcagcaccacagtcgaaagaataaaatcgtactctccatcaaatgtgaggttattcagatcaacgacccgggtgtgtaaattatccagattttcaatggatttaatgcgctcgacgttggcgatactcatggcatttttatcccatgcgtcaacatcataaccattggctgccaggtaaagactgttacgaccattgccacagcccagatccagcgttttacccggtttaaccactttcaccgcttccagtacttcagagtgtgtgcgggttaattcatatttatcagtaaaataattttcgtcacgaatgatcattctttgtcctctgctttcattaaaacggcgcgctcggttctgactaacaattttccctgcatcagaagcgccaaagtacggatgagcagtattgcaataataaaattggtaaagataaacagcggcaccgccagcgtatggaaaaatccattatcgctgccactccccagatgcaaaccggtggttgccagtgcagatacgccgaacgagaaactccagaatgaagcattaaatggctgggagagataccatggcatcagacgtagcataaacagcagttgcagcagtccataaccgaaaagcattttcgccagcgtgtcaccctcgccgccgttgacgctcagccaggcactacaggccaccagcgcaggagcgagctgaatgccgagtgatgtccgcagtgccgtgggtaattctcccgaactacgcagacgctgcaagatcaccggttcaaggcttagccatgagaaaacgcctgcgcctaaaaacaccagaccggcgtcggtgtagcccaacgcaccacaggccattgcgctgataaagttgttggcaactgtcggcagatacagtccaggcgtagtagcttcttcagggtgagatccgcgccataatcccgcagtttgccaggcggcataagccaactgaaccacgacaccaaaactgaacaggcacaccgccagtgggcgaaaccacggaacaaaaccaatcgccaccagcatcgtcgttgcaggaaacaaactcacaaaactgctcagcactggatggcgaacttccgccagcacgctatgcggaaagcgtatgagtcgggtaataaatgcgctagtcaataatccccagatgatcatcgccagaatcaccagcccatcccctaaccagtggctgacctgccaaacctggctggcatagcgccaggcaaatcccatccctatcgtccccaacacaataccaaagtagcctgccggcaaattgagcactttatcgctctgcatcttcttactcattttgtttaatttataaagtatatttgaaatgcattttatggaattttctcgagcatagccagagccgcagaatttgctacggttatagtaagtcacctgtgggaaaacgctatgcgcaaatatcgtctaagtgaagaacagcgagcctttagttatcaggaagatggcactaaaaaaaatgtgttattacggcagattatcgccattagcgattttaacgatgtgatagcaggaaccgctggcggctggatcgatcgcgaaacggtgttagcacaggaaggaaattgctggatttacgaccagaatgctattgcgttcggcggaacggtgatttccggtaatacgcgcatcaccggcaccagcgtactgtggggagaggtttacgcaacggataatgtctggatcgataatagtgaaatcaaccagggtgcatatataagtgacagtgtcaccattcatgactcactggtttgcgggcaatgtagaatatttggtcacgccttaattgatcaacattctatgatcgtcgccgcacaaggcttaacgcccgaccatcaactcctgctccaaatttatgatcgcgcaagggttagcgcctcgcgtattgtccaccaggcacaaatttatggcgatgccgtcatccggtatgcttttattgaacatcgcgccgaagtttttgattttgccagtattgaaggtaatgaagagaacaacgtctggctatgtgattgcgctaaagtctacggtcacgcgcaggtgaaagctggcatagaagaagatgccattccaacgattcattacagttcgcaggtggcggaatatgccattgtggaaggtaattgtgtgttaaaacatcatgtcttgattggcggaaatgccgtggtacgtggcggaccgattctgctcgacgagcacgttgtaatacaaggtgagagccgtattacaggtgcggtgataattgaaaaccatgtggagttaaccgaccacgccgtcgttgaagcctttgatggcgacacggttcatgtccgtggtccaaaagtcattaacggcgaggagcgcattacgcgaacgccgctggcagggttattatgaatcgataatacgcgcgtataagttcacatcatcataggcatcattcaggaactcagcctgtttcaggcaaccttcaaggataaaaccattgcgcaaagcgacctggttgctttgcggattgtccacccgacatttgatcacgaagcgtctaagttcaccagactgagcgtaatgatgaatcagtgcctgcagcgcctgagaaatgatcccctgcccctgatgagattcgtccagccagtagccgatttcagcggttttattcagtggttcaatacgattaaacgagataacgccgataagttcatcttctttgaaaatcatgaacattttggcatagccgcgttgatgcaacatcacattaccctgcaccgtttttcgcgtgtcctcttcaatctgaacgaactgcggccagtttagcgactgctgtaaccaggttttatttttacagattaactgataaagaggagtgacgtgattttctgcaacagcatgtaattcaagtgattcgcttacttttatcgtttcagtcatcttatctccagtcaatccatgcagttgttaaaaaagccgcctggctggcggcttaggaaagtttacacctctttgacgctctcatgctgcaggattttgggcatctcatcttttaactgtagcttttgttttttcatgcggaccacttccgcattgtaccctcgaccgtcggaaccttcctttctggcaatttcatgatcaagtttattgtgtttatcgaacaaggacataaagcgaggattttcgtttttcagacgggatattaaatctcgatattctggaaacatacgcactccctgttagtggctgacaaggtgtatctgaaatacacaccatcagattactcatttaacttagggaaaaatgcgagcgggatcgtgtttaaccagacggcacctcccgaagaaggtgccgaagaaaaaacgattaactcatcacgcggtcgtcaacatactgacgtttatccggcgctggcgggaaatactgatacagccatgtttcactgatagcgtcgccctgacaacgcagatacatccgcatatcgaccggatcagtggagtccgaagtcggataccagtcaaactgaatacgataaccatcaatgggttcaatatagagaatttcgatttgcttcgcttccccactggaaagcgtaatcaccggctcaatgccttttggtgcggcagctttcagatcaccaccaacgaaatcgacggcaaaacgacgcgcccatttttcgggatagtgttcacctggtgcccaaccttccgggaaaccgcccatgccggtacgcgtcgccataacgcgcgctaatgggcaatgaacaggcggttgcgcactccagtacagacgatactggaatgcaaactcatcacccgcctttacagctttttctggctgccagaagcagacaatgttatccagcgtttcgcccgttgttgggatttccatcaggccgatggtgcccttaccccacttgttacgcggttccacccacagacttgggcgtttgttataccagcccataatgtcctgataatgggagaaatcacgatccagttgcaataaaccaaaccctttcgggttgttgtcggtgtaagcattgaactgcaatttttgcggattattcagcggacggcaaatccactcgccgttgccccgccacatggacagacgatcagagtcatgaatttgcggatgaatggtgtcgcacatccgacgttcattagtaccgcagctgaacatactggtcatcggcgcaatgcccagctgtttaatgtctttgcgcgcatacaggtgattttccacatccataatcacctgacttttctcacaatggatagtgaacttataggcaccagtaatgctggcgctatcgagcaacgcataaacggtaaaggtagttgcccccggttttaccgtatcaaaccagaaggcggtaaagtcggggaactcttctttactgtcggtgtaagtgtcaatcgccaggccgcgggccgacaaaccgtattgatatgtgtcatcaacggcgcggaaataactcgctccgaggaatgatactacatcacggcgcgccagttcgggggctttaaacacgcgaaaaccggcaaagccgagatcgctttgcccttctaattgtttggtatcaacacctgcatcgttgtatttgaacaactccgggcgaaagtgaatttcacgcgccagatgtgttgctggatctacagaaaacatacgaacgcggcgacggaatcccattcccatatggaagaactgagcgtccagttgacggttctcaacgttatgccagagcgatttttcggcgtcgtattgaatactgttataagcctgcggcgtcattgtcgccagcgtgtcaggtaacggacgaggcgcaccacgccacgctgtttgcgctaagtcgtgcgccattgactgtagaatggagaagtcaaaacgctgggtttgcccgtcggcaatatcagaatctgccgcgaatgccgcctgagaaaaaagagaagcaatgccgctggtaccgcacacggcggccatagccattgaacctttaataaatcgtctacgatccatacctgaaagtgagtccttctggtgttgtgaatggtcccgcgctggtcgttttcagcggcaagaaagtgcttatttatgaccgctcactctagacaatatttattaataatccaattgttgaactgagagaatatgcataaatcggcaatttttttatgtcgatgggatgagcctgattcgtttgtaaaatcaggcaaatnnnnnnnnnnnnnnnatggtcagaatttaaagcaaaccacagcgacgtttactgcgttcttccgcttcctgataaagctggaactcatccaaaaccggacaacccaacgcctgctcaaatgcttcgcgactggcattaccgtggctgcgtgcctgcgtttcattacccagatttgactggaagatccccgccgcgctaacgggcaagaaatcttcataggtaatgggttgcgccgcgacccaaccacgttcaattaagggctgtggatcgtctccgggatgaatcgcctgacgatgcgcctcacctgaaggcgtcagacggtaccggaaccatgccagcccttgctgacgcattaaaaactcactgtcaggaaaagtgcggaaggtttcctgtaaatgcatttggtgagtgagattatcctgcccggttccagcgttacgcagaagatcatcatacagttgtcgacctttcggcgttaatgccacgccacgctgctcaatttcaccaaagcgcgcagtatgcgtgccctgtttctgccccgcaaacaacaccgtctcttccagtgctntaaagctggtctggcgtagtaaaatcggtacctcgcggcgcggcgggcccttcgatcagaatttttggttcaattccgcattcaggcatcatcgactgcacccggtcaatatccagcgtacgtggcgtcagatggttgatatggcatccaggaaaacagaccacatcagcaatcaaccgatgttcgttgtgcaaggcgcgataggtttcttcatctaccgttgctgactggtgccaacggaacgtttccagggcctcctgcacaaactcctgtgcctgtgtttcgttaaaaccgccccgctggtcatactcctctaacagttgtcgacaacgtggggtgaagatatcgcgctgacgcagaatctccgccgctttcnnnnnnaaaatttcgttctcgataagctcaaggcggagtaaggaggtaaaaacgcggaagggattacgcgccagagaagcatcatcaatgggccgaaatgctgtcgaatgtaccggcacccctgcctgcgagagatcgtaatagctcaccgggtacatccccataatggcaaacatccgccgaagagtagcaagctcttgtgcagtcccaacgcgaatcgccccatgacgttcaacattcagtcgnnccnnnnncgtctgcatttaccattttttcgtgcagttgaggattgttttccagcacagccagattcacatcagctaccagttccagcagcgtgccatattgcggaacttcttgctggtacatggctgacattgcctgcgaaaactgttcccgaatctcatccgccgtgatgctgttcgccatagtgtctgcctccagtggtcagtaatctggagtgtaggtaaccgcattcactctggcgggaagaatttacaaactgtgatctcgccgcgaaaacatcaatattatccattttgctgtaacataattgctttaattgttaataatattttgcaatcaagttatcataatcaaacaacttcacttgtcagcgacaccgcttcgtttttaacatcgcttatggaaaaaaatagtctgtttagtcagcgcatccgtttgcgccaccttcatacattcgtagctgtcgcacaacaaggaactttggggcgcgcggctgaaacccttaatttgagtcaacctgcgctctctaagacattaaatgaactggagcagctgacgggcgctcgcttgtttgagcgtggtcgtcagggggcgcaacttaccttacccggcgaacaatttttaacgcatgcagtcagagtacttgacgccatcaacactgccggacagtcgcttcatcgtaaagaaggtcctaataatgatgtcgtcagggttggtgcactacctactgcggcactggggatattaccttcggttataggtcagtttcatcagcaacaaaaagagacgaccttgcaagttgcgacaatgagtaaccctatgattctggcgggtttgaaaaccggggaaatcgatatcggcattggtcggatgtcagatcctgaactgatgaccgggcttaattacgaactgctgtttcttgaatcgctgaagctggttgtccgccctaatcatccgctacttcaggagaacgtaacgctaagccgggtgctggaatggccggtcgttgtatcaccagaaggcactgcgccacgccagcattcagatgcattagtacagagccagggatgtaaaattccttcgggttgtatcgaaacgctgtctgcttcgctatctcgtcaacttacggttgaatacgactacgtgtggtttgtcccttctggcgcggtaaaagacgacctgcgtcatgccacgctggtggccctgcctgttccgggacatggtgcaggcgaaccgattggaatactgacccgcgtagatgcgacgttctcttctggttgccagttgatgattaacgctattcgaaaatcaatgccgttctgaaaggtgaagggatctgtcgatccctcctttaacattttcacaccggagcgaaactaactggttcacccgctccgcgaggttctgccaacacagattgtttgttcagacggaatacgtccaccgcctcagttaatcgtgccgcctgttcttcaagggacaccgccgccgctgaggcctcttctaccagagaagcattctgttgcgtcaccttatccatttcagaaatcgcctggctaacctgcgttatgcccctactttgctcatccgaggcggcggcaatttcctgcatgatatgtgtgacactcgcgacggcatcaacaatagtgctcatggttttcccggccgttgccacctcatccgatcccaggtcaattaacctgactgattcactgatcaagccttcaatttcttttgccgcctgggcgctgcggcttgcgagtgtccgtacttcgctggcgacaacggcaaatccacgcccttgctcacccgctcgcgcagcttcaacggcagcattcagtgccagaatattcgtctggaaagcaatactgttgatgacggcggtgatctcagaaattttcttcgaactcgtggagatagcgcccatcgtttttactacaccggaaaccgtctgcccgccatcgctggctttaatagaagcctcttgcgccagtttgctggcataatgcgcgttatccgcattctgtttcaccgtcgcagtgagttgctccatgctggcggcagtttgttcgatagccgccgcttgttcttcggtgcgagatgacaggtccgcattgccagctgaaatttcgctggtgccacgataaatctcttccgcaccctgtcgaacagtccctacggtcatccccagtgaatgctgcatttgctgtaaatgacgacttaagcgaccgatttcattacgacccgccggttcatccttcatcgtcagatcgccactagcgattttttcaatccgttgtgcggcatgttgcagtggacgaatgacgatccgacgtagcaccataaatgttatcagcgtcatgaccagggcaagcacaaacgcaccaatcatgaacatcccgcccaggcgggtgcgctgatgggccagttccgccagttggttggctctggtgctacgtatcttaacggctttgttcaaaatatcggtataagcattatccagcgttcggatctgctcactttcatgattgataatcgcttcaaacatgccatttttggcatatttcaacataggttgcatacccgtgatataagcctgaaagcgttgatttaattcagtgtcgagggcttcatcagcaggtgttttcaccggccgattctgataagcacgataaccttgctgcgactgtttaatctccgattcggcttgcgcaatatttcgcttcattgcttccatttccgcaatacgactcgcagccccggcctgaatcatattgatccgggctgaacgcaaaaaatctgaactgttcgctaacccggtccgaatctcaatctccgcagtaacatcacgctgatcgcgatcggcctgccagaggaaatagccagccagggctgaacttaatgcgaatagaactaagataccgcctagaatgcaggcaaataacggaaccaacctgatgtgatgcaaaaaacctaatcgctgtgagggagttgtattcattaccgttgtctctcgtccaggtttactcctgatagaaagtcatcggcatttgacggtaattacttacgactaaaagcctctttgcgtcacatttttacaacaattattgcagagaagattaatgccattggaatgaagagagtaacgaatggttaaactggctaacccgaatgacgaaaaattctggaaaacagcacgcaatttcgtcaggtgattattttcgtccctaaggaaaccacataggatgctcacgggtgcctgagactttctgttttcaggctaaccgggaatcagaaagacgaaggccccgaccgatatttctatcaaccgaggccaacgaatgaaccaagcaattcagatgttagcctcttacccgccatccggcaaggagaaaggctatgaagcgcaaccctctggtggtgtgtctgctcattatctgcattacgattctgacattcacactcctgacccgacaaacgctctacgaactgcggttccgggacagtgataaggaggttgctgcgctcatggcctgcacgtccaggtaagggcaagcgcggggattttccccgcgcatctgactagcagattcattttctcatggcaccccttttacacttcagttagtgcatgtttttttcgatgcactaatagaaccatcattacagacaaatttgccgcctgccgtacagtgtgagatcccccctttcgaaccagaacagggtttgcgcccggcatcggcataaaaggaaacaagcgttcccataaacaaaataagtaccagttttttcatataacctccatggtttatcgaatcttatgttcgatttgaacgttatacgctggtttattttgataccgttgatgagatcaaagatcgggtgaattgattaaaaataagccagatggacgtatgggcaaggattatggttttatttgtcatacaaataaatataataggcgcttccgatgtagacccgtattcttcgcctgtaccacgggtcggttttagtacaggcgttttctttaaatatccttcaggaacgtttacgcggcatcatgcgtanaagtgtgttgtccttccagaaatagtggtgtgccagtgcagccgcagcgtgcaaaccgatgacaaaatatcccagattcgccagcgtttcatgccacgactttaagctatctacccgttcgaaattggcctctgaagcgtaaggcatcgtcaaaccaaacgcaaaccacgggttgcctcggttatacatcatcaccaaaccaatcactggcagcgcaataaacaggagataaatcaccaaatgtcccaaatgcgccagtcccgtcatcatcggttttggcttaggtataatcggcggggttgggtatttcagccttaacaaaagacgaacgaccatcagcacgagaattgatatgccgcaggaaacatgaatcatgttgatgagtggccgatcgctacgtgggaataaaccccgaaactccattgcgcaatacgctgcgataaccagcaaaaagaccagccagtgaatgctgatttgtaaccttgagtatttattttccataacatttcctgctttaacataattttccgttaacataacgggcttttctcaaaatttcattaaatattgttcaccctttttcagtacgttacgtttcactgtaagaatggagattgcccatcccgccatcctggtctaagcctggaaaggatcaattttcatccgaacgttcctgacaggagaaaaccatgagtaaagttggtattaacggttttggtcgtatcggtcgactggtgttgcgtcgattacttgaagtcaaaagcaacatagacgttgtcgctattaatgatcttacttccccaaaaattctcgcctatctgctgaaacatgattcaaactatggtccgttcccctggagcgttgattttacggaagattcacttatcgttgatgggaaaagtatcgcggtttacgccgaaaaagaggctaaaaatattccgtggaaagcgaaaggtgcagaaatcattgtcgaatgtactggcttttatacctccgccgagaaatcgcaggcgcatcttgatgctggcgcgaagaaggtgttgatttccgcccctgcaggtgaaatgaaaactatcgtttataaagtcaatgacgacactctggatggcaacgacaccattgtttccgtggcatcatgcactactaactgtcttgcgccgatggccaaagccttgcatgacagtttcgggatagaagtcggcacgatgacgaccattcatgcctatactggcacccagtcactggtggatggcccgcgtggtaaagatttacgtgcttcacgcgccgcggcagaaaatatcattccccacactacgggcgcggcaaaagccattggtctggtgatcccggaactgagcggcaaactgaaaggtcatgcgcaacgcgtgccggtgaaaacaggttcggtcactgaactggtatcgattctcggaaaaaaagtgactgccgaagaggtgaataacgcacttaaacaagcaaccaccaataacgagtcatttggttataccgatgaagaaatagtctcttccgatatcattggcagccatttcggttcggtgtttgatgccacgcaaacggaaattaccgccgtgggcgatttacaactggtgaaaacggtcgcctggtacgacaacgaatatggcttcgtcacgcagcttattcgcaccctcgaaaaattcgctaaactctgacgcgcacaggcggaggaaaaaacctccgcctctttcactcattaagactgtaaataaaccacctgggtctgcagatattcatgcaggccatgtttaccatctgcgccgccaataccggatttacgccatccggcgtggaagccttgcatagcttcgaagttttcacggttgatgtaagtttcaccaaacttcagccctttaatggctttcatcgcgacgttcagattttgggtatagattgatgaggtcaggccgtaatcactgtcattagccattgagatagcatcttccagcgtgtcaaatgcgactaccggcagaaccgggccaaaggtttcctcatgcataatcgacatttcctggcgaacatccagcagcaatgtcggcggataataatatcctttcccctctaccgctttgccacccaacgccactctcgccccttcttctactgcgnnnnncactttttgctcgaccctttccagcgccgcggcgttaatcaacggccccatcgcaatgtcgttgcgttcagcggggttaccaaattgaaccgcctgcatcgcttcacccagccgattgacgaactgatcataaatgcctttctgtacataaacacgttctgcacagttacacacttgcccactattaatgacgcgtgaatcaacgatggctttgactgccagttcaagatcggcatcgtccattacgatagctggtgctttaccccccagttccaggcacactttggtgatgtttttcgccgcagtcgccatgatcttctcacctgcagagacgctgcctgtcatactgaccattgcgacctttgggttacccgccagttcttgcccaacggtttcaccacgccccagaacaaggttaaacacgccgcgcggaaggcctatttcatcgacgattttggcgaatgcaatcgcattgtttggcgtaaattcactgggtttaatgacaatggtattaccagtcaaaagagcgggagccattttgcgggcaatgaggaagaacgggaagttccacggcagaatgccggtagtcacaccaagcgcacgtttaaacagaagaatattttctcctggacgatcgctttgaataatctcgccctcgtaacgccgtgcccactccgccatgtaatcgatatagtcggcagtaaaagccacttcgacttcagccagctgctggatcttgcccccttcttcaacaatcagcgcactgatttcgctggcgcgttcgcggatcccggcggagattttgcgcaaccaactggcgcgttcaattgcaggcaacgcttcccattctggttgtgcacgttctgctgcatcgattgccttacgggcatcctcggcctgaccatcgggaatgcgggaaatgacagcctctgtagcagggtttaccacatcaatccatgcgtctccacgccaggtaacaaactgtccatcaatatacataggatgttgaacgggtactgacatgggcgactcctgtgatttatatgtttgtttttggtaaatacattgttaattaacatcaatcatcatagagacggcatcatgaaaggacaattctgtgaagggcttcataaaaacaagtgtaaaaggaataagaggcagaaataaaaggcaggagttatgcccgtttgcaaacaagtggttcacaaacgggcaatttttaacgtaacgagcgactttccatcgcctcgatgagcaccgcatcgtgtttcagcgtttgccatgcatggatgacttctgccggaaaatcaacgtgaacgataaaatctcgcccgcggggaccgtagccatcgctatcatcgcgtaaacgcggcagctcgccagtgagtagtgagagataacgctcaaccggccataatccttgtaactgattaataaagattacactgtctgcgttatttcctaactgaggaacgaatccgggataacttaaccagcgtggtacatcgggattgtccccggtcatacggcggaacgtcgccatcgtgcgccgctgcatggtggggtcctgtacaacgatagctgtgtgaactcgttctacggcctgattcaatagcgcgatgctaaagcgtgcgttttcaccgcagtttgttgactggtcttcaatccagattttttcatgcggaatatgccagaactgatgagcgatatccgccaggatggtcgcttctgctctgccagtggtgcggatagtgttgtagtgcggatgctgtgcgatggcgctatacaaaaaagtggtcgagtgaccgataccaccactaatcagtaaaggaatttgctgatcgcgagcaatcttacatgccgcatcgatagtcggcataaccgcatttcctgcaagtatgacgcaatcagcctgatacggcacctcaccggagaaatcatcctgcgccagccactgtccgataacatttatggcatctatagttgccgtcgaaagcgtcggaaacggggtaatgttcatggttcctccttatcgttcccttaagaatactgcgtgagataatagtgagaagcggagcactctgaaaggaagataatgctttttctatctcgccatcgcgaaccagacactggttttagtcatacactatttgcggagaaactgttgataaaacatcaataacatcatttgacgtggcaataacataatgttcgatcattttatttttatgaatttcacaactttgcatagtaaaccatgtaagataagtggaattggctactctatagatccccgtttggttaattccctgctttcctgacatacctaacaaatcaccttcgtcagtaacacgaaatgagtgtatccagtcaaatgatatcttaacttctgacttgatcgccgggcatatcagggncagttcaagcctggcattcttatagcttaaacctgacagatcggcgtgtttaaaagacaacgaagtcggcgtgatatttataaaacgttcatccatgttaacacccttaatatatgagactgtactcaatttaaccttctacaaaaatggtgtgagtctgtttaagtaccatgtataatcgataaccgttgctgaattttaaaattatcttgtccagttattaaccatttttcatgggaaacatctgcaatacattcattaatgcgaaatacaatttcccctcaggcacccatattctaatcttatcatcccctaatattataaattgcaattgacgtttgaaatctaaagttttattttcaggtaattcagtttgtatttttttcttgatatcatcaaggtagatgtgatgacaatgttcaccaaacatactcatcacttccagaccgtttacagatgtccatctttgttcactttcccaataaacaagaaccggtttgcgacaggtatatctgcctaaaaagcgccgaatgtgttcttcctgattctcgtaaaatattgcctctgcattcgagatttgccgacgcattcgccagcggattttttcttcataaaaagacaagttgtcgaatttgacattacgcacattcattgtcaataactcgcatggttttaaatgtaaaacttaaaaaaccaccaaacaaatgaagtgaaattttatacttctttgccttataaacaattgtcgcatctttaatattacctgcattttggttatctataagttcagcaatatccataacctgcgataaatgttccactcctgtaaactcgaacctttttcgttcccttccggctgtaaattcatcaacataaagctccgccgtcaatataaaattatactcggtgtggtgacattccattctggtttctactaaaacaccatcatgccagataatattttctacatttttcatgctattaactattctcaggtaagtaaccattagagtttctaaactggttcgatgacgcagatactctcgttaacaaacaatctagctcaaatgtgcattgcgtaattatgatatcattattctttttaataagttcacgcaaaacacttttttgagtttcagtaaattcaataacatttattgagcgtacaaaatcgctaatggtctgttggcgtagaaattttttctgtgacatgatgtaaaaaataaacttaaattcgtcgtcaccgacgttaagtttaatcggataaattattgataaaatatacagcgcgnntcggtaattttcctctggaagtttttcatagaaagatattaaagcctgaccaacgcgatcaccctctattatccgttcaaattgcgacctcagtaaaatatcatgtctactcattgcaatacgtcctgttcgcccaaggcgaagtatgaatgaaacttatgtaaaatagtaccgcccttgctatatttcagaattcataaagaaaaaacccggcgctaaatgcttaccgggttttagatttatcaggcaaatagcagggttaaccgctaatctgctccatcgcctgcaaaatacgcttatctgaaatcggataaggcgtaccaagttgttgagcgaagtaactaacgcgcagctcttctatcatccaacggatctctttcacgtcttcatcctcacgacgtgcaggcgggagtttgttgaaccattgctgccacgcctgctggacgttttcgactttcagcatctgtgcacgatcgcgatgtggatcaaccgccagtttttccagccgtttttcaatcgcctgcaaataacgcagcgtgtcgcccagccgtttgaagccgttaccagtgacaaaaccgcgatataccaacccgcccatctgcgctttaatgtcagaaagccccagcgccatggtcatatccacccgccctttcagacgtttgttgatattgaacactgccgtaaggatttgctcgacctgcttcgcaatatccaccaccgtgtcgttcagttcggcacgcactttntcatgcagcgcagcaaagccttcttccgtccagaccgggcctccattggcgtcgatcagttgatccacaccgcatgagatacagtcgtcgatcagctccagcactttgccatacgggttaaagtacagccccagcttggctttgtttggtaacttctcatgtaaatacttgattggtgagggaatattcagcagcagtagacggcgaagaccgttccacattgcctgtttttgctccagcgggttatcaaacagtttgatcgccacactgtcgcgctcatccaccagcgccggccacgccttcactttgtagttaccacgcttctgttcgtagctttccggcaactgaccaaaactccagatatgtaagccgctctgctcgataccgtcatccgccaccgcagatagcgtttcctgcactttgcctttcagcgcatctttcagatcttgtagcgagcgcccttcttttagcttcttgtttttgtcatccaccacgcggaaggtgattttcaggtgatcgggcacctgatcccagtgccagtcttcgcggtcaacggtaacgccggtcatccgccgtaactcgcgctcaaggctgtcgagcaacggtaactccagcggtgtgacgcggcctaaaaacgcttcggcatagtttggcgcaggtacaaaattacggcgtaccggtttcggcaacgatttaatcagagcaatcaccagttcgcggcgcagaccagggatctgccattcaaacccgctttcctcaacctggttaagtaacggcagcggaatatgtacggtcacaccgtcagcatccgcgccgggctcaaactgatagctcaaacgcagcttgagattgccctgatgccagaagttcgggtaatccagcttgctgatcttttccgccccttctttgatcaacatgctcttttcaaagttgagcaaatcaggcgtttcgcggctgacttttttccaccagctgtcgaagtgacgagcggagattacatcgtggctgatgcgctggtcgtagaactcaaacagcgtttcgtcatcaaccagaatatcgcggcgacgtgatttgtgttcaagctcttccacttcggcccgcagtttcaggttttcacggaagaatgcgtgacgcgtctgccagtcaccttccaccagcgcgtggcgaataaagagttcacgacataacgccggatcgatctggctgtagttgaccttgcgcgcggcaacaatcggcaaaccataaacagtgactttttccgttgccatcaccgcgccctgcgcccgttcccagtgcggttcgctgtaggtacgtttaatcaaatgctgagcgacaggctccacccattccgggtcgatacgcgcagcaatgcgccnccacaggcggctggtttctaccagttccgccaccattacccatttcggcggttttttgaataaaccagaaccggggaagatggagaaacgcgcgttacgtgcgccggtatattcttgtttatcggcatctttcatgccgatatgggaaagcaaccccgtcagcaacgcaatgtgaatttcacgatactccgccggttcgctgttcaccggaatgccgagttctttcaccacctggcgcaactgggtgtagatatcctgccattcgcgcacacgcagatagttgagataatcggtacgacacaggcgacggaaggcgttggaagaaagcgccttttgctgctcgccaagataattccacagattcacaaacgcgaggaagtcagactctttgtcgtggaagcgacgatgtttttcgtccgatgcctgctgtttgtccatcggacgttcgcgcggatcctgaatggagagcgcagacgtgataatcatcgcctcacgcacgcagccatgtttttgcgcttccagcaccatacgcgccagacgtgggtcgacaggcaactgcgagagctggcgaccgagcggcgtcagtttataggcgctggcctgttcatccgtggtgatcgcgcccagttcttcgagcagacgcacgccatcctggatattgcgtttatccggtgcttcgacaaacgggaacgcagcgatatcgcctagccccagcgcggtcatctgcaaaataaccgaggccaggttggtacgcagaatctccggatcggtaaactccgggcgcgagaggaaatcgtcttcggaatagagacgaatacagatcccttcggacacacgaccacagcggcctttacgctgattggcagacgcctgcgaaatgggctcaatcggcaaacgctgcactttggtgcgatagctgtagcggctgatacgcgccgtaccggggtcgataacgtatttaatccccggtacagtcagcgaggtttccgcgacgttggtcgccagcacaatgcgtcgcccgctgtgcgactggaacacgcggttctgttcgctattcgaaagccgcgcataaagcggcaagatttcggtatggcgtaagttcagcttgttcagcgcatcggcggtatcgcgaatttcccgctcgccgctcataaagatcagaatgtcgccggggctttcctggcttagttcgtccacggcatcgaaaattgcctgcaactggtcgcgctcagtgtcgtcggcttcttcaacaatcgggcgatagcgcacttccaccggataggtccgaccggagacttcaataatcggcgcattnnnnaagtggcgcgaaaagcgttccgggtcgatagtcgcggaagtgataatgatttttaggtcaggacgccgcggcagcaactctttcaaataaccgagcagaaaatcgatattcaggctacgttcgtgcgcttcgtcaataatgatagtgtcgtactgcatcagcaggcggtcttgctggatctccgccagcaggataccgtcggtcattagcttgaccatcgtgttatcacttacgtgatcgctgaaacgcactttgtaaccgatgcaaccgcccggctccgttttcagctcttccgcaatacggttcgctaccgttcttgccgccaggcgacgcggctgggtatggccgatcagccctttaatcccgcgccccagctccatacagattttcggtaactgagtcgttttaccagaacccgtttccccggcgacgatcaccacctggtgatcacgaatcgcttcgagaatgtcctgttttttctgactaaccggcaaattgtcaggataagtaatttccggtcgtgccgcttcacgcagcaggactttccctgccgcctggtcaatctctttcgccatctcctggaaaatggcctgttgtgcatcaggatttttaaccttcttcacgccgtgcagacggcgagaaaaacgcagtctgtcacgcagcatcagcgaatccagccgctgctgcaaggccgtaaaggtcaatttttgttgttctgtcataacgttagtgggcagtagtctgcctgattaattttctttgaaatgatagatatagagtaccacatcgcggctttctatgcgttgttcaataaattcgaacataggcttcgatttattgcgctatctctgtggcaggattgtgaataaagtgtcaacaagcaacggggcatcgcccattcaaatatctataaggaaacaccatgagcaaggtattagttcttaaatccagcatcctggcagggtactctcagtctaatcagttgtccgattattttgttgaacaatggcgcgaaaagcactccgctgatgaaatcaccgttcgcgacctggctgcaaatccaattccggtactggatggcgaactggttggcgctctgcgtccgagcgatgcgccgctgactacgcgtcagcaggaagctctggcactttccgatgagctgattgccgagctgaaagcccatgacgttatcgttattgcggcaccgatgtataacttcaacatctcgactcagctgaaaaactattttgacctggttgcacgtgcaggcgttactttccgctataccgagaatggtccggaaggtctggtaacgggtaaaaaagccatcgttattaccagccgcggtgggatccacaaagatggaccaacggacctggtgacgccgtatctgtccacgttcctgggctttatcggcattaccgatgtgaaatttgtcttcgccgaagggatcgcatacggtccggaaatggcagcgaaagcgcagtctgacgcgaaagcagccatcgacagtattgttgctgcataaccggacacgatcttgatgtggactgtagttcagtccacatctcaatccacttacctgttttcccataatttcaacatcgctttgtgctcttccttaagcacaatatgcgagcgtctggctcgaataaagctaatcgcttcatcaactgttttacagtgtccgtaacataacagccatgccgccactaccagcgcactgcgcgataatcccaatgcgcaatggaccagaacgctgccttgctcttcgcgtaatgtttccagcatcgccacggcctgtcggagctccccctcttccggaaccaccagatccagcatcggtacacagcaatagagtcgatcttttgtcgctcgtccgcgagggaattcaaaggtgacatccagaaccgcattctgtgccggaatatgtcgtggaaacgcccctaaataaacaccagcagtcattttgctcaccggctccaggcgacgacaaaaccaacgcatagatagccacatcccgatgcgccagggcaatgtcagccagtaaacggcgggcgggagtttcccctgactatctttccctgttgttatcgcgccaagcccaccgtacccacggccaataatgagtagcgataatactggccaacataaccagactgaccaccataactgaaccatcatcattagctccatcaacacaatgcacgcgcacgcgcctacgacatatggcagtgctattttgattcgacgttgatcaggtttctgataattccaacgacggtcgacgggtatcatccagtcaatcaacatacctaccgccagccctgtgatgacatcaataaaatgatgctgccaggttgtcagcgtcgaaatggcgatgagtaaaaaccatccgccgcagactttacgccacctcacagccagatgctgacgaaagtgacgccaaagtagccagcagagaacaatatgcagcgaaggagactggttataaggcagatcaaacagttcaagttgcgaaaatagccatcctgtcaccccactcacttcaggacggataaaactaaacttcagcgggtagagaaaaaaaccgcagcaggccattaccgttgccagaataagccggtggacaagtcggcgctgttcgaatgtcgagctacaaacgaacagcgaaaatccatataaaagatccagactccagtaagggacaatagtccagggaagaaaagggatcgccgtttcccagccgaatacctgactggggatatcatggctgttaaagtcctgaaccgcggtgaactgatttagagatccataggtgaagaagaaaaacggggccagcaacaataaccagccagcgccttgtagcaatacgttccggcgttcagttatcacgacgcaccgccatcgaaaccgtaaaaatgccccactcatcaatccgttgtgtgcatttatcaaatccggcatcacgcacgagtgaatccatctccccttgcgaacgcacgcgcattacccacggtttaccatctttatgactggttaacaccccggcaatcagctccagttgtgggtgccacggctgcccggtgtagaggagaatgccgcccggttcgatggcattggcaagacctgcgagtgagttttttacctgctcatttccgggaaaaagctcatacagtccagagacaatcgccagcgtaggccgcggagttaacgcgctgagttcctccgggttaaacgcatcgccctgttcaaaacgcacccgcccagacattccccgttgagcaatcatctcttgcccctgtgcaacatttaactcgctgtaatcacgtaacaaaatatcgcttacggcaggctcgtttgccagcgcatccagtacatagcgcccatgccctgcggcaatgtcaaccacgcggacggctaaacctttggcgtggagatcggcaacggcttgtttaatcagtatttgtaaatgggttttgcgctggcgaataccgcgccagccaacactgttcaggtagattttgtcgattaagcgcccgaatgcgttactaccttgcggttgattttgatagacataatccagcgaactgcctgaatcaaagccggtgctcattccgagatgcaggcccgcagagtgcgtcccgaacaatttcatcgctttacgcataaagcgatacgccaaatcaaccggcgataatggcacgggtccacctgaaaggagccgccagcgatccgctgatggtccagtgcggtcttcatgctgataatcaaatttttgtgacttgttagcatataaacgactaataaagctttgcattttttcaaatgcctgcgccctgttctcttcacccaacgtgtcgtgataaaagcctggcagcagatgcagctctttcagagggctacgtaatctatgataaaaatcaatctgcggttggcgatgcaccacatagtcatcgcctgatatcagaagttgcgtggggagcgtaatcgccgccgcatcgctaacaatacgttcagacgttttataaagatcgagcaagatattaacggcaatcgcccgtgtgatcagcggatcattattgaaactcgccacccgttgccgatcgtgggtcaaatagcgtcctttcacataggaattaataaaaaacagaccacgcagacgatgccataacgccagcgcaggacgtgccagcggcacatacaatttaaccttaaaggccggagaagccagcaccagcccgcgaattgcaggcgcataatcatgaacccatgtggcaaccagcactgcgccgacgctctgcgcgatcactaccacctcttccagcccgacctggctgtcgctggcagcaaaacggacaaactcatcgacatcccgcactgaacgcgcaagagatgggctataaccacggggccccgaagtttgtccatgccctcgggcatcccatgcataaaaagcagtatctggcatcgccagttcatcaacgatatgttgtagacgaccagaatgttcatgaccgcgatgaaataagacgatgacctttttcgcccctggctgtaaagcgggccagtgccgataaaacaacgctgtattatcactggtggtaaaaaaatgttccccagggatgcgtgaattttccattttctctattttccttcagtaacagcagtagcgaataaaataaaaaaataccggagcggtgaaaattaatgagtcaatcctgtcaaggagtccgccatgtcctggtaatagttttccgctatctttaacacccacatctcgtttgacggctgacatcactacatcgccgcaaaaaccactaataccaattaacaaacccgctaataatgcctgtaatgtatttagcggtgtcagcaacggtccaataatcagtgacgcaatcatggtggtgattacgccccccaccagaccttccagcgtttttcccgggctgactttggggaccacttttcttctgccgcaggatttcccccataaatactgtgcaatatcgtttgactctgttaacgccaaaagaaataacaccagtaacgccccgccctgggtatttgtggttgtcaacattaataaccaggcggcatgactcaaggcgaaaacggtcattatccagccccaaaaaatggcgctcacggtatgcagaaaaccggaggtatcacctactaaaactcgccaggtggttaatatcagaaacccagccaaaggtataaataacagaaacagctcaaagcaactaaaaccgataagcaaatagttaagaggaataacccaatataaccaacgcggaaaatgtacggatataagcgtacaatattctttcaatgccagaaaacttatcagcgcaaaaaacgtcaacgtcatccagcgtggacctgaaatcaccagtgaaaaacaaatgacgataccccaccaggtacgaatacgtagtgtaacttcatccccttttctctccggtaaccgccatacccgaaaacggtttatcagcgttgctaaaattaacaacgcgaaaagtgttgccagagatttttccagcattatctttcagcactcatcaggagcacactccgacaacgattaatcgcagtccagagaagcagaattgaagcaatgctccataaaagattattccattgcatccactgtggataaatggcaacggccagcccccacaacccaaatattaacgcgcgatcgcttttgccaaaaggaccgacataactacgaataccgttaatcgtctgcgcgagtaaaccgcaaaactcagtcaatatggtgcaaaataacatgagtattacgagtgatgcgttactttccggtaaaaataaaaacggtaaatagagcgcaatatcggaaataacatcgccagtttcatttaaaatcgcccccagacgtgtttgctgattgcactcacgcgccaacatgccatccagcgcattgagtaccatacggataaaaagcacgatgggcaatagcaaaaagaggatgggttgtgcgaccaacatcaacagcaatccggtaataagagaaagcgccagtgcagcaagagtgatgtgattcgctgtaacatggtgcttataaagccaaaacatcgtcggccttaacagcgactgaaagagcggttttatctggtagagcgtcattatcaatccttgataattcggtttgcgctatggtgcatcaattcccctgacggagatatcgcaacacgacgcttcattaaaaattcagaatatatcaaggtattggggactcactgtcaggaatgattatccccaataaatcaagtggttaaaaattattacgctgttattcaatacaactcatcaagttttctcatcgcttgttcccgtattgcgcgcgtcttaccgttaagcgccagctggcgaactaaatccagttcagggttaacacgctttaacgccagcaaaggatcacgtttcagcctcgcctttaatacatcaactggaaaacggggattattcatcgccacaatccaccactcgggatcaatttctgccgccagtactgcaggcggtgtgtggcggttgttaagtgcnccgaacttgaaaaatgtgagattgcttttcgccagtgtactccaccatatacgatccggttgttttgccagtacatccagttgtgctaacgcatcggggtctagtgcataataaacacgtaacgcttcgttaacctgcgcacgggaactgttttcctgcctcagaaaaaacttcgcccaaatatcattgcgtggcgtgttttgctgtaattccttgagaacaacagcgggtaaattatcccaactaattaatgcactctctaaaaagtcccagtcgtccgaacgtatcagagaggtggcatttaatagcatctggtcatcaacttcaccgtagctgataagctcagacaaaatcatatcagcgctggtttcatatgcatctgaatctgctttgggattatttttccgatgcgataaagcacgttgccaaattttttgtttcatcgacgtgctcagatactgatttttcgccagattactccacccctcaggatcgttgaaacgtgtcaataaccgttgtaaagcagcgtcagagtgaattatctgcatatcccgacagcaaaagtaggcaggggattttttctccatccttttaacaaaattaaactgtaagttatctggcaacgctaaaaataacgcacctattagatcatcgtcattctcgaatttttggtataaatatactgctattttgtcactctcttgtggcgtcatccgcaacaattgaccatggtgtttcatctctgccaactttaacgctaagcttgtgacaacatcgtttgatgaatcgttcgccaactgcattgcctgattgtaggtgagttgtcctccagcaccgacctgacgaatagaggaatcatcactgcggatatagccatcaataatggattcgggcaataaccacgcatctttataaagctcctgaatgatcatatcccaatctcttttcgccagagtcatgacgatatccagagggagattttcacgtagcgcaagattcaacggaccgacaccatcaggtagatgactcattcgcgtcattatttcgacagagagcggttcacggtcgagcaaccccagaacaacaggctggtaacccaattgctgatcggtcaactccagaatctcattgtcaggcatatatctcgccatactttcaatcgtttgtccatcattgctattaataagttgtttgcgtcggttagctgaaattcctttaagccttgggagagttcgcattatggcaagatcaaatgtcgcaatatctcgtccttcaaatgcagcaacgttgccttcatccagcatttgcaattcctgcactaactcaggagaaggcttaaggcgaaacagcgcttcttttttcatctgattacagacattccctgccatgcgaatattgcttcgcttaaaaatttctttcagagcatcttcatcatttattagaccccaataatatgcatcaggatttattatcatcagcgcttttttgacattttcagtgtcatttttgtcactcgcacggaccatgaattcactatttgtcgaagacgcaacaacaggtgcaattatgtcattgataaatatcccacgcgcattaatactccccttaatcgtagacggattatcgtaatatgagtcgataaataccagtccacttgcatttatcgaaccggtaattaacagtggtgaatccgtaactatattcgttgccgtcacgttaccgagaataacccatggattagaaagagagaaagtggaaatattacctttgactgtcaaattgccaagaacaatcaatttttgattactctctatattaccttctaccactaaatcgccacgatgcactttccagtccgatgcagataaaccgaaggggacaagattcacgctactgttgatagcttgttcaacttgttgtttatcttcagcggtnnnngcagaaaaaaaaggttcaatatcaactgcatttgcaacgcatcgaagttccgcctgtactggaagactcagcataaacaggggaagtaaacctatccagctgcaaatcctgggcttaaacatatgcactccatgccattaaaaaagaaacaaaagggaaatgcatctttcccttttgtatattcgttattctcgcgaaataccatccaacgtagacaacactttctcagaaagatgcaacttttcagcagccatattctcccgtaaatgcgcaacagaagacgtccctgggatcagcaaaatattcggtgaacgttgtaacagccacgccagcgccacctgcattggtgttgcacccaagctcgcagcaacatcggaaagcgtggaagattgcagcggcgtaaagcccccgagcggaaagaacggcacgtaggcaatgccgtcacgagccaaagcttcaatcattgcgtcatcagcacgatgagcaatgttgtattcgttctgcacacagacgatttcggcaatcttgcgcgcctctgcaacctgcgtcggtgtgacgttgcttaggccaatatgttttaccaggccttgttgttgcatctctgccagcacggtcaggctggcttcaatcgatccttccgccgggccatgaccatcccccatcatcacgcgcaggttaaccacatccagtacgtccaggccgagattacgtagattatcgtgcaccgctttttgcagctctgccggagaaaatgcgggcaaccaggatgcgtcctctccacgccgcgcaccaattttagtgacaattgtcagatcgtcagagtaaggataaagcgcttcgcggataatctgattggtgacgtgcggaccataaaagtcgctggtatcaatgtgattgacgcccaatgccagcgcctcacgcagcacggttatagcgacgtgacgatntcttggggggccaaaaaccccaggacctgccagttgcatcgcgccataaccaagacggttaacggattttgtaccgagagtaaatgtattgctgctcatcgcaccctgccctgtaataaaacggattaagaaaaatcagtatagaaacgaaaagagataaataatgcgaaggcgtaaacaagatttctggatgagtagcactattgtcctgaaagacaccaaaacattagacagcaaaagataagtcaagcgtcgcatccggcaataaaaaaccgcaacctgtatcagcgttgcggtttgtgtatcacatgctaaaaattagaacgttttcttaaagttcagcatcacgcctttgtcgctgatgccgtcctctttccagtgatacgcatccagattcagcgaactttctttgctactgtacttcacgccgacgctcgccaggctgttgataccgccgcccttctgaccgtcatcgacgttaaagtgctggctgcctgcccctgcaaggcttgccgtgcgctggctcttgctgtagctcaggttcggcccgccttccagcgtcgcattcgcgctccagccgcctttccctgcgtagtccagtttcagcccgacgatgctgtccaccgccgtttcgctgccgctgttcatgctcaggttaaagtctccggcattgcgctcctgatagccgccttccagcgagtgacgcagtttcactccggcgtacggggtgattttcagcccttcgcgcggctcaaaggttttcgccccttcgctacgcaactccaggtactgctgtttcacatccgtatccgccgttttgctgacgtcgccgtaagcgaccgagcggctgctgtcgagattatgcacgtcataacgcagcgcgttgttccaacgtataccattgtcgaaggacatctggtgcttcaggccaaagaactggctgtagccgccggttacgccattgtcgcccgctttctgcgcaccgtcgccatccagacgcgcgataccgtattccaggctcatgctctggctttcgctcaggtcaacggttttacgcagtgccagcatgtcatactcggtgttatttccgagttccgcacgcgggtcacctttcgccaccacgttaaaggccaggccattgcccaccttcngcgcggcatccgccagcatgctgaagcggttgcttaacacacgcgcttcacggaataccgtggtcgcctggctaccgctcacctgcttcagggcgctattcagttcagcagtggtgcccacgttcaggctggtatacagctcgttattggtgtaacccgcatccagtgccttcgccacatcgttcaccgaagcatcggtcgccacatcggtgtaggcgtttttgctcatgatgacgtcaacgttgccgctggcatcggtgctgcctttggcggtccataccacggacgttgaggtgatggcatcggcgtcggtcaggttgatgccttccaccacgttgtcgaaactgaccgtggtgtctgccgtaccggcggcgaaaccggtgttgatcccgacaccattcatgctggcgttgttgaccttcagtttaccggcgctgccgtcaacgttggtaccgacgatatagccgttgaggttgttactgctgccatcgctactaccgctatcagtcgtttcactgaaaggtgaagtggtgtaagtgtttggcatgtccggcaacgtgtagtcggtgtaatgcacttcggtattgttaccgctgttgccgttcaccccttccacattcacgctgtcgccctgcttaatcaaccccgaaccagtcacgccgtcggcaatcaccaccgtaccgttgttaacgatatgaccttctgtgcccagtacgctgaacgcaaacgagtcgttagcaaaaatattgatcgtgccgttgttctcaattaccgcatcggcggtggcattggcatccagttgcataccagtcaatccggtatcggtggtgccttcggtaccgagattgataacgccgttgttaaccagctgtgcgtttttatcgccttccatcgccacggcgttgttgccgctgatgttcattacaccatcgttgagagcaacatagttgttgtgggtgaatttaaccgcgctggcgttgtctttatcgaagttaattaccccgccatcctggttccacaagaaggcatcgctttctgtcgcaccggcagtacttaccgccacggtgactttcgcatccaccacgcccttgttaataaacnggctggcgccatcgtcgtagtgaatagcgcccgcacctaatgcggcatccagcgtcatttcaccggtgttatataacgtggcgttagcattgctgccctggaagcgaatggcgtttttgctgttatcaaggatgagtttgccgctgttgttgaacgttgacttatcgtcaatatccagcgtcccggcattgttgttttcatcctgataacccattttccaggtacccgcgttattcactaccgcagagttatagagaatcgcgcctttacgcgcctcgccgcctgcaaggttattgaataccgcatcgccctgagcgttaacgcgcgccgacgcaataccgctgttattcaccgtaccatcgtgaagttgtaaagttgacagggaaccggtgttattaattaccgcgttgctgtttttctcaatttttacgacgtcattaagcgttccgttgttattgaaggttcctccttccagagtcaccgtgttcaatacaccttcattggttaacgcaccgccttcattcacgacgatggctgagctaatggttccgctcgactcgttaaccagcgcaccattttcgagtatcctgatcgttccatttttaacagcacccgcactggtgacatccccgttgataatcgcacctgacgataataatacggtctcacccgcagaacttaatacagcgccatcatcatataaatcagcaatataattatccgttggattatattcatcggncccctagcaaacgccaaaggtacaaattgtgccatagttgataataagcccagtgccatcgttatagaatgcctgaccattttccgcgttaatgttgattacgcctgtctggtcattaatggcggtgccttcgtgataaaccgccatgccgacgagtttattcacaccgagagaatcgttgtaattttcatttttctccaggttgatggttccctggttaatgaccgtattagtattcccatacgccgccatccccgcaccggcgttgtagacagtaatcacaccattctcgtggttggttgccgtggctttagttaatgccccattataggcatcggtacctgaagccattcccacaccgaaatctttcgccgtgctatttgcaacattattacgcagcgatgtttcatcattttcatcaacccacagcgtatccagggtgatttgcccttcgttatccgcggttgatttatcgatggctagcatccctacactgccacggccatacatatcaataangcccgtttcgccgttcagaatggatgacgagtagctggcaagcatacctgtcagccctaatgccttgttattgaaagaggtaccatcagacaagttccactctgccggataattcagcacactgtgctgattcatcattttggtggtcatggtaccattgttaacgccaatcccaccgtattcaacatcaaagacttttggtgccgggtcggtaccaaaatcgtacatcgccaggccaatggatccgttattgattaccgttgaatctttattccaggcagccgcaaaaccgatatttttcagttccacttcaccgttgtttgtcgccttcgcaccagaatcaatactaatggtggataacgctacacgataataataagtgaaagaatccacatcactcatatcaaacgttgcgtcagcgccaatctccagctccgcgccatggctcaactgaatgagattttcgaaccccagcgggaactcgccgctgatggttgactcaccattcaggtagaccggggaatgcccatcaacgttaataagcggtgtgtctccgataccacgtcgagaagctgatggttttgagccatcatccatgacatttttttcaccgacaaaatggacaccgccattaagcgtaaaggtattgtcatcgccagcaataacaatacctgcaatgtgttcctgagcaccgtcgtaactcgcataggaacgcgacgtggtttcactatcagcaacaacggttaactgaccatccagcgtgacgtcgttgttgtcaccgctgatatttaccccggttgagggattaaagaagtaaggctgcgcattatcggctttctgatctttatcaaccagaatactgcccgctatttcgatagtattaccatcacccgaaacattaacacccgtcgctttttgccctgtcacattcagctcataagtcgccagcgtcatgttgttattattgccagagacatcaagaccggtggagaaatccccaacgtctaacccacccgcgagtgaaatattagctttatccccagcaacgctgacaccggttccggcattggtcgcggaaatatcaccaacgttaacaaatgtcgcattatcaccgtcgatctgaatgccaatggcattttcacccgctgcggcctgaccaacattgaggtcgcccatgttgatcacgctgacgccatcaccatcaagcagcatgccaatagagttatcttcgatgaccgtaatattacctttgttgctaacgaacgtatcattgccgtcaacgtcaataccgtgcncaccaccgcttacgtataagtcgccttcctgtttgatggtggcaccgtcaccgacaattttcgagccagtggaattctctccgtcaacgctcatggtaccttgattatcgacccgcgcattatcgccattgataaggctacccgtaccaccattggtgatggtcgagtcgcccgcagtgtttagcttggtattatcgccattgatgattaccgcggtaccgccatcaacttccgtctcgccattattgttaatggtgatattgtcgccagtgagtataccgacaaccgagccttctccgatggccgtcgttttgccgtcgttgttgagggtgatgttgtcaccatcaaccgtcatgacagtaccgccattcagcgccgtgttgccgccctgatcggtgatgatcgcgttaccaaactcaatcgcattcccggttgtgccgtcaacaacgacgccggcctctttagtgatgtggatgagtccatcatcgtcgtaactccaggtgatgccacctgaggtatttacgccatcaaagacaacggtgttgctgtcgtcatggactgtccaggacttaactatcgtctccttgccctcaggcgccgttaaggtgtagctcccatcggcattttggctgtaggtaaaggtagtttcgcgaattttgacagtttttgcatcctgatcccaggttacgccatttttatagacgacaggatcgtgtttaaccggggtatcgccaccatcgtctggcggaactggcgtatcaccgccgtcatctggcggaaccggcgtatcacnncccgtcatcaggcggaactggcgtatcaccgcnnnnnnnnnncggaacaggcgtatcaccgccatcatccggaactggcgtatcaccgccgtcgtctggcggaacaggcgtatcaccgccatcatccggaactggggagttattatggtggtgattgtcatcgtcacttaaggtatatatagcaattcccgtagctactgcagcaagacctgcagctgcccatggtaaaactgcactatctttattttctctgcactccgcggatnaattttctagctgctctttgctcagggaatgaatatttgccggacatgttatcttactggacttacgtgttttttcggttgagtcgggtattgaagtatccgcagcccatgtctggctacttaacgccatggcaacacaaacagacaataattttttcctttgcatataaaattccttagatctagaccgtgcgtaacaagccatgcagaatttgaagataaatcgtagtaaatattcatagtgaaataagcagtaaagaaatgcttatataattcacaaaatcaatattaaaatcaggcaagtaaaagcatacaaaaaaaacagttgatggaattatattccacaaaaaactcacttcaatctaaaaattaacgacaaaaaacaaaaacacactaataattcattgacgctgcatatatattttgtgattatatatatattggtaatgatttgttatttaagggaaggatatataaggtttttgtagaaatacccacggtaattaagcatgctaacgtcagtttaaatactgtaaaagatcattacattaatagatacattttgtagccaactataatttatttgcgcaaccatttaccattaactccctgaacatattgccccgacttcgcgcgagcaacaagcttttgtccagccagtttggctatctctttagtggatacactattttgctttgccagttgttggtaactatggttacgagcttcattaatatcttttactaatgcctgtgtttcggcatccgtttgtagcgccaccaggtaaccgttaagcgtttcacctacccgcccctgacttctggcttcgttcagggttaaagccattgcactgtcgctcatcaggccaatggcccatacagctatgagtaatgttcttttcatcatcacctcaaaatagatcgctacgggttttgagcaggtcttcaacgtccttatccgctttaatgatgatttcatgctcaattttaacgttcatattaatggtgattggctctttcggcgcagccacttcaatgcgaggcgtgcaaccaaccaacataaaagaggacgcaaacgcggctatcactattttcattgtttttcctcacactcttttcctgatgggcagccagtttccggtagctgggcattctgctccagccatacctggagattatcgccaaagcgtaaactgcgccataacgtaaaaatattctcttcatggtgataattaaggtttaccgtaccgcttttaccatcgacgcgactggtgcccgaaatgttggcctgcatggttaacacaccgagattatctaaattaatccttgttgatgagcgactgatttccatataacgcaaccagttgatggcagttccagcggtcatattgtctttggccaccgcatctgcagtgtctttatccagacgcagcgtcatcgnccccgcgtttgccaaccagccatctttgacaatccatttttcattgttcagccatagtggcaacgccccantaaatgccccagacatagcaaactgtttcggattaaccgcgctaaccagttcgctggatgagagattattcagccgcaacagcgccgggtcatgttgcggcatacgtaattgtttcatcagcacgttaccgcctaacacatcgacgctaacatcagtcaacagcaatggttcttcttcagtccacggataacgcccttgcaaatcagccgtaatatttttcgctgtcaccagattaatcacttcggcaattcgcaacgtaacggggccgcgagtccccagatgccaggctccatcggcaaaacggaaaggcaggacaaaatcgacaccattaacctgattatctggcatccaggcactaccgcctttcaacacgccgtgccctcccgcgcggaatccttgttcaggcgcagcagaaaatgcaacctgagcatacagttcaccatcgcgtaagttcatcttccagtcgggtggcaccagcggctggaatacagtcagtgattgtttaggccaccaggcgttaccgcgcagacgaataccgtcccagcgaccatttacccgaaccgggccaatctcaccagcatgtaaatcgcctttaaagaggaaatacgtcggatcgcgcccatcgacgctaaattttaaggttgatggcggtaacacactgccgccagtgaacagcgtttgcccggcgtccagtgacagcgcgccgctgaaggagggatgctgtgcgtcacgtacccagacgacgggcttgtcgagaattaatcgcggcttttctaccgtcatcgtaccgtattgtaactggtcgaaaccggtggagagatcggtcagcgtaatcgtgctgtcatgccactcaccttttcctgcgacatcccaggtggcattcatcggtgtaaaactcccttttccccagtagcgccactgccagcggccagcgtcagggagaaaatcattcgccagcccatccatatgcagcacgaaatcgcccagttcattttcatgcgcctgcaaaatggcctgcaaacgtccgtcaacaccacgttgggtgacttttacacccgctaaaggccagcggatttcatcgatgtccagcgaatcgatgactcttccctttgaacgaagtaacgcgcctggctcaaaggtcagcgttgggtcagacagacttccacttagctgcgcaggtaaacgggcatataaaatgaggtccgcctgtttcgcttcaccggtcagctgcagaggcagctggctgttatccatgcttaattttcctgggccaaaattaagcaccgcgttgcccttacccgcttgcccctgggtcagcacactcagtcgtccgctgaccagagcgttctcaagccctgcctgccagttgtcgactttgacacccagtcggccactcaaaggaaaacctgcatacggccagctccagcgaccatcgcttacggtcaattgttgacgagtaatttgccacggcaaatcgagcaacggatcgccgttatcccgtgccagcacgatcaattgcccgctattttcctgccagtccagctcggcatccaccagtgacggttcctgcggcaagtttaacgtcgcagtagcatgcccacttacaggaagtccatccggcatgagcggcatagtaaattcccccaccagtttaaccgacggctgattttcaaacgcgacgacatccagttcgctgactgtaagttgttgccctttcagctggccttgaaatttaactttttcgccctgataacgcagttgctggatatcagaggttaatgcgagagagagttttccctgccattcctgccagggagaaaaaatcagtttatcaatattgatccaggtgttaggcagcatggactgccattgcgcgagggtttttggagcagctggcgattgctccgtctgcggcaatttcgccagacaagcagaatcaagttctaccgtgccgacgttcaataaccagcggctgggatgtgaaaggctggcgttggtgatatgcgcaagctgacaatctcccaccagataacggagatcgggaatgattaaacctttacgcgtaatgcgtgggctttcatctaatgcaatacgtgtcccgagcggtagccagatgcccgccagcgtgggaacccacagcccgagcgtcatcagcagcgtcaacggcacaagaataatcagtaataacagcgcgagaacggctttatatttacccagcatgggtagttaatatcctgatttagcgaaaaattaagcattcaatacgggtattgtggcatgtttaaccgttcagttgaaggttgcnnnnnnnnnnnagcatagttgttgatgaatttttcaatatcgccatagctttcaattaaatttgaaatntnnnnnnnnntttttagtaacttaaatgtgattcaacatcactggagaaagtcttatgaaactcgccgtttatagcacaaaacagtacgacaagaagtacctgcaacaggtgaacgagtcctttggctttgagctggaattttttgactttctgctgacggaaaaaaccgctaaaactgccaatggctgcgaagcggtatgtattttcgtaaacgatgacggcagccgcccggtgctggaagagctgaaaaagcacggcgttaaatatatcgccctgcgctgtgccggtttcaataacgtcgaccttgacgcggcaaaagaactggggctgaaagtagtccgtgttccagcctatgatccagaggccgttgctgaacacgccatcggtatgatgatgacgctgaaccgccgtattcaccgcgcgtatcagcgtacccgtgacgctaacttctctctggaaggtctgaccggctttactatgtatggcaaaacggcaggcgttatcggtaccggtaaaatcggtgtggcgatgctgcgcattctgaaaggttttggtatgcgtctgctggcgttcgatccgtatccaagtgcagcggcgctggaactcggtgtggagtatgtcgatctgccaaccctgttctctgaatcagacgttatctctctgcactgcccgctgacaccggaaaactaccatctgttgaacgaagccgccttcgatcagatgaaaaatggcgtgatgatcgtcaataccagtcgcggtgcattgattgattctcaggcagcaattgaagcgctgaaaaatcagaaaattggttcgttgggtatggacgtgtatgagaacgaacgcgatctgttctttgaagataaatccaacgacgtgatccaggatgacgtattccgtcgcctgtctgcctgccacaacgtgctgtttaccgggcaccaggcattcctgacagcagaagctctgaccagtatttctcagactacgctgcaaaacttaagcaatctggaaaaaggtgaaacctgcccgaacgaactggtttaatcttgccgctcccctgcaatccaggggagctgattcagataatccccaatgacctttcattctctattcttaaaatagtcctgagtcagaaaactgtaattgagaaccacaatgaagaaagtagccgcgtttgttgcgctaagcctgctgatggcgggatgtgtaagtaatgacaaaattgctgttacgccagaacagctacagcatcatcgctttgtgctggaaagcgtaaacggtaagcccgtgacctgcgataaaaatccgccagaaatcagctttggtgaaaaaatgatgatttccggcagcatgtgtaaccgctttagcggtgaaggcaaactgtctaatggtgaactgacagccaaagggctggcaatgacccgtatgatgtgcgctaacccgcagcttaatgaactcgataacaccattagcgaaatgctgaaagaaggtgcacaagtggatctgaccgcgaaccagttaacgctggcgaccgcgaaacagacattaacttataagctggcggatttaatgaattaatagctgccacagctcccggcggcaagtgactgttcgctacagcgtttgccgttgggtaatgcacacatcccaatcgccgtaccatccagttgacgggcaacagaaagcgaaccgccgatcattgcacaatttgcttctccactactggacatcgacgcttttaaacctggcgctacgtgcgccgcagtcgcctgctgaacaggctcactactacacgccgacaacaataaagcggcacaccctacccaaaacgctgctcgcatctcttcttcctctgatcttcaagccaaacgacaccgccataaataataggcagcacagagggcgacgtcgagagctgtcctgcgcgttgccccgcatttttacttttttatggctatttttttgccctctgtttgatcaaaacattcattacgctgatgtgggggacacaaaagcgaaaatgcagaagaaagccatttgctaaaattgaaagattactactgggcgcgcagcaatttcgtgcgcccctcatttgcgcaatgtaagggtgtcatatgattactattgacggtaatggcgcggttgcttcggtggcgtttcgcaccagtgaagttatcgccatctaccctattacccccagttccacgatggcagaacaggctgatgcctgggccggaaacggcttgaagaacgtttggggagacacaccacgcgtggttgaaatgcagtcggaagcgggtgctatcgctaccgtgcatggcgctttgcagacgggtgccctttcaacatcgtttacgtcatcgcagggtttgctgctgatgatcccgacgctgtacaaactggcaggcgaactcacaccgtttgtcctgcatgtagcggcacgtaccgttgccacacatgcactctctatttttggcgatcattccgacgtcatggcggtgcgccagacgggttgcgcgatgttgtgtgcggcaaacgtccaggaagcgcaagactttgctctcatttcgcacatcgcgacgctgaaaagccgcgtgccatttattcatttctttgatggtttccgtacgtcccacgaaatcaataaaattgtcccgctggccgatgacactattcttgatctcatgccgcaggccgaaattgatgctcatcgcgcccgggcgctcaacccggaacatcccgtgatccgcggtacgtcagccaatcctgacacttatttccagtctcgcgaagccaccaacccatggtacaacgcggtctatgaccatgttgaacaggcgatgaatgatttctctgccgcgacaggtcgtcagtatcagccgtttgaatattacgggcatccgcaagcggaacgggtgattatcctgatgggctctgccattggcacctgtgaagaagtggttgatgaattgctaacccgtggcgaaaaagttggcgtgctgaaagttcgcctgtaccgtcccttctccgccaaacacttgctgcaagctctgccgggatccgtacgcagcgtggcggtactggacagaaccaaagaacccggtgcccaggcagaaccgctctatctggatgtaatgaccgcactggcagaagcctttaataatggcgagcgcgaaactctgccccgtgtcattggtgggcgctatggtctttcatccaaagaatttggcccggactgtgtactggcggtatttgccgagctcaacgcggctaaaccgaaagcgcgctttacggttggtatttacgatgatgtgaccaatctgtcactgccgttgccggaaaacaccctgccaaactcggcgaaactggaagccttgttttatggccttggtagtgatggcagcgtttccgcgaccaaaaacaatatcaagattatcggtaattccacgccgtggtacgcacagggctattttgtttacgactccaaaaaggcgggcggcctgacggtttctcaccttcgcgtgagcgaacagccgattcgttccgcttatctcatttcccaggctgattttgttggctgccaccagttgcagtttatcgataaatatcagatggctgagcgtttaaaacctggcggcattttcctgctcaacacgccgtacagcgcagatgaagtgtggtcgcgcttgccgcaggaagttcaggccgtgctaaatcagaaaaaagcgcgcttctatgtgattaacgcggcgaaaatcgcccgcgaatgtggcctggcggcccgtattaataccgtcatgcagatggcttttttccatctgacacaaattctgcctggcgatagcgccctcgcagaattgcagggtgcgattgccaaaagttacagtagcaaaggtcaggatctggtggaacgcaactggcaggctctggcgctggcgcgtgaatccgtagaagaagttccgttgcaaccggtaaatccgcacagcgccaatcgaccgccagtggtttccgatgccgcccctgctttcgtgaaaaccgtaaccgctgcgatgctcgccgggcttggtgatgccctccccgtttcggcgctgccgccagacggcacctggccgatgggcaccactcgctgggaaaaacgcaatatcgccgaagagatccccatctggaaagaggaactctgtacccaatgtaaccactgcgtcgccgcttgcccacactcagctattcgcgcaaaagtggtaccgcctgaagcgatggaaaacgcccctgccagcctgcattcgctggatgtgaaatcgcgtgatatgcgcgggcagaaatatgtcttgcaggtggctccggaagattgcaccggttgtaacctgtgcgtcgaagtttgcccggcgaaagaccgtcagaatccagagattaaagccatcaatatgatgtcgcgcctggaacatgtcgaagaagagaaaatcaattacgatttcttcctcaacctgccagaaatcgaccgtagcaaactggaacgtattgatattcgtacatcgcagctgattacaccgctgtttgaatattccggtgcttgctccggttgtggcgagacgccgtatattaaattgctgactcagctctatggcgaccggatgttgatcgctaacgccaccggctgttcttcaatttatggcggtaacctgccctctacaccgtataccaccgatgccaacggtcgtgggccggcatgggcgaactctctatttgaagataatgccgaatttggccttggtttccgcctgacggtcgatcaacaccgtgtccgcgtgctgcgtctgctggatcaatttgccgataaaatcccggcggaattactgacggcgttgaaatcagacgccacgccagaggttcgtcgtgaacaggttgcagctttacgccagcaactcaacgatgttgccgaagcacatgaactgctgcgtgacgcagatgcactggtggaaaaatcaatctggctgattggtggcgacggctgggcttacgatatcggctttggcggtctggatcatgtattgagtttgacggaaaacgtcaacattctggtgctggatacgcaatgctattccaacaccggtggtcangcgtcgaaagcgacaccgctgggtgcagtaactaaatttggcgagcacggcaaacgtaaagcgcgtaaagatcttggcgtcagtatgatgatgtacggtcatgtttatgtggctcagatttctctcggcgcgcagctgaaccagacggtgaaagcgattcaggaagcggaagcgtatccgggaccatcgctgatcattgcttatagcccgtgtgaagagcatggttacgatctggcactcagccatgaccagatgcgccaactcacagctaccggcttctggccgctatatcgcttcgatccgcgtcgtgccgatgaaggcaaactgccgctggcgctggattcacgcccgccgtcagaagcactggaagaaacgttacttcacgagcaacgtttccgtcgtctgaattcgcagcagccagaagtggcagaacagttatggaaagatgctgcagctgatttgcaaaaacgctatgacttcctggcacaaatggccggaaaagcggaaaaaagcaacaccgattaaatgctctggataaggattatccaattctaaaaaaaagcccggacgactgttcgggcttgtctttttatatgttggaaaatcagtggcaatgcaatggcccaacagaaaataaaatctgtgacaataaaggcatataacccgcgcagaataacgtatagaaaattaaaannnnnnnnnttannttgtanntattatcttcgatacattcaccagacttattatcatttcagaggaattatttgattaaggttttacttaaggcgtaacaaatgatatttatcggctaactgaacttctcctttaggatgttttcactccccgaaatggggataaaaggcaaataaaataactaaaggatttattcaatgaaaagcaaagtactggcacttttaattcctgccctgctcggngcaggtgctgcacatgcagccgaagtttataataaagacggcaacaaattagatctgtatggcaaagttgatggcctgcattntttttctgataattcagcgaaagatggcgaccagagctatgcgcgtctgggttttaaaggcgaaacccaaattaacgatcaacttactggctacggtcaatgggaatacaatattcaggcaaacaacactgaatcttcaaaaaaccagtcatggacccgtctggcatttgccggactgaaattttcagattacggttctttcgattacggacgtnnnnnnnnnctggaccgatatgctgcctgaatttggcggtgactcttataccaatgcagacaactttatgactggtcgtgccaatggcgtcgcgacttatcgtaatactgatttcttcggtctggtaaatggtctgaacttcgcggtgcagnatnaaggtaacaacgaaggtgccagtaatggtcaggaaggcaccaacaacggacgtgatgttcgccatgaaaacggngacggctggggtctttccacaacatatgatttaggcatgggctttagcgctggtgcggnatacacctcttntgaccgcaccaatgaccaggttaaccatactgcggcgggtggtgataaagcagacgcgtggactgctgggctaaaatacgatgctaacaatatttacctggcaaccatgtattcagaaacgcgtaatatgaccccgtttggcgacagcgattatgctgttgcaaacaaaacccagaactttgaagtcactgcacagtaccagtttgattttggtctgcgtccggcagtctctttcctgatgtctaaaggccgtgacctgcacgctgccggtggtgcanacaacccggcaggtgttgatgataaagatctggttaaatacgccgatgttggcgcgacttactatttcaataaaaacatgtccacttatgttgactataaaatcaacctgttggatgaagatgacagtttctacgctgccaacggcatctctaccgatgatattgtcgctttaggtctggtttatcagttctaaatcctcctgcccgctgttatggcgggctttttctgcttattcttcctcctttgatctaaattaaaaatgtgaactccgtcattacacaaaaagtgtcatctggcgttacactttatgcggatactaaaacaggaggttttatgaacagaacgattcttgtccctatcgatatttccgattcagaattaactcaacgcgtgattagccacgttgaggcagaggcaaagattgatgatgcagaggttcatttcctgacggtaataccttcactgccctactatgcctctctgggtttagcgtattccgcagaattaccggcaatggatgacctgaaagcggaagccaaatcgcaactggaagagatcattaaaaaatttaaactgccaaccgacagagtgcatgtccatgttgaggaaggctcgcccaaagaccgcattctggaattggcgaagaagatccccgctcatatgatcatcattgcttcccatcgaccggatatcaccacttatctgctcggttccaacgccgcagctgtagtgcgtcacgcagagtgctccgtgctggttgtgcgctgacactaacgcccgcacattgctgcgggctttttgattcatttcgcaaatgtgctgacattttcccctctaatccgtaccatacacgccacagtttttatatcagatttcttatgctgggcgttccggcatgacgcatactcttctgatgccatataacgaattgagtcgcttttaaatgtcgcaaaatcaagaaattagcaagaaagaacaatacaacctgaacaagtcagagtaaaaaccgcaactatctgacgaacaataacttttatgtttttcaatatgttaggcaggattaacaactacaataaagcacaataatctacactttttttgccccatttttgccccttttgcggccttttgtcccatttttgccacagtaaaaatctataactaatcaatctggcgcccatgatttctttccaatagaatcagttccggctggaaatcattagatactcgcactatcgaaaagcttaccagccaaccgcggcacgttcttgcatacgaggtgccgcgttttacatgccgtaccgagaattaatttcattttacgaaaagttaacccgccattgctaccttaattttttaaaacgaagttacctctgtcagggtcaaaagcacaattatctcttcctacaatcattgaaactgcgattgattccctgctcaaaggatgagccgcccttgttttaacaagatgtattaatgccattttatcatacaacatacaaacatttgaattcattgaattcctcataaataccccatcttctggttcacataatgtaacagggcatgttcgtaagctctctggcacttgcaattgtgcatgctccacattaaatgcacatacttcaattttatctaacaactcctctaactggtagttagaaagcaaatccatattttcgagcatctcaatttcacgcagtactgtaacttcacggcttgtcaaactaccatgattaagtgtacgttcaatatgttctatatattgaaggccaatctggatattatcattcgataaaccatcctggttaagacttcccataaaatatccatttacctgcataggtcgtattgacaccatcaactcacccagtcttatttgagcttctccacgaatagtctgattacgtatctcagacaaggtttcttgaggaatgtcagacaaaaaactaaccccaggtaaaatataaggcgttaaatctacaggcattcctctccctccattttaataacttaattttgctttagtaaaaaataaaagtacataaaacnnnnnnnntatcattaattatcacttacaacaaaaagcttctctttttgtatcaaagtgacattcatcttttctcataatcattgattctgttataggttctcgactcagaggatgagctccaccagtttcaacaagttgcactaacgcgtccttatcatatagagagcatatctcagcacctcgtgagtttctcatgaacaccccagtctcaggtgtgtccagcgttatcgggcatgtcaaaaatgactccgggcaagaaaagtgattagaatcaggtctaaataaacaagaatttattttttccattaatattttattacttgttttattttctctgtgttctgccatgacactctgaaaatagctattaacactacttaaaaaatcgacacctccatttaattgcctttccagagccacagcccttctctccattcgatgctcacgccccaatagcctatccagtaagcctcctctcaccggttcaactgaaaatccatccagtagttggacatagtgaacagaatattggccactaccaatggatattcttattccactttcaagtctggcagcatcctgcaaagactgtactcctgcaggagataattgagatatacttgggatacttaaggtggtaacaggcataaaaacctcattcagtaattcatatcagtttgcaggatgtttcattaaataaaataaagggtaatgttcatttcaattaccctttataacgaagtttcctctggtatcgtcataaatgcattcttcatgttttacaattattgatgccgttattggttcccgggtcagtgggtggggtaagccttcaccaaccaaacgagaaaatgcagcggcatcaaataaagtacatacatctgaaccatctgaattcttcacaaaaatacctttttcaggcngctccagtgtaattggacantgaatagcctcaagcgggcactgaagtctctctggacaaacagaaaacttacattgagatattttgttctgaatactctcttgcgattgtgcttcacctgagtcngaaagcatacttagcattctctcaccaagggctcgaggaccactattaaatcccaaaagcaataactcagaaagcaatccgccattaccgccactggatgaaaagcgcccattagtagaatcatacacaatactgacagtttcaccaccgactgtaatatctccgcgcccattggctacaattcgggcacgaacaacctccaccccaagattaaatgaatgtgatctaatatctgaggttaatggcataacaaagctccctattttaatttgaactccagacttaaatagctgtaacaaacatcccctatacgtgacaacaaaaaccagagcnggactccggtttttgtgaacccgtcggctatttcatcccgccaatattttcccacntcccgtcagcacgtaggatttgcagcggtcttaccacgcactgtatctgctttttatccgcatccagtatcaccacctgygtgattaccctgtcctgctccggaataatgccattctcatctgactccaggatgtctgccggccccagncgcagttgtactgtaagcgactgcccgtgttcacngtcatcatgctttccgcaaccacacagacgctccataagctttctcaaaatattcatgtcattctcctgttctgcctgtatcactgcccacttcatccagncccttnacatcctgccacggcccgtcnccaaacctgacctgcaaatgctgaaaaaaaccctgaaccngtgtggcatctttggggncaagaaaggtcagtccggtgatgagtgcgccatctgtatccgggaaccagccannnntgtttgtctcaataatncctnncggccccagacgaaaacggatttgtgtctcccccgggtcgcccttcggtccctgaggtccggttgcccccaccgggccagccgcacctgtttctcctttcggtccctgtgggcctgccgggcctgccgcaccggtatctccctttggaccctgtggacctgcatttcccgtcagaccggtctctccccgctctcccctgtcacctttcgnnccctgcgnncctgccggaccagcatcacctgccggtccccgttcgccggttgccccgacagggccggtgtcaccgcgctctcccttatcacccttcggcccctgaggacccgcgggcccctgttccccctttggcccgggaggtcccaccacggtggggattcggtttacggcctcttccgccgctatcctgctttgttccgctgactgtgcgctttctgctgactcccgggctttttctgttgcggtcgttgcatccctggctgcattaccggctgcactttctgccgtctttcttgacaattcagcttctgctgcactttgtgatgactcactggctttttgagcggccgcagaagccgaggacgaggacgcatcctctgactgctttgctgaggctgcactttctnncgcctgccgggctgactccgatgcctcccctgctgaagtgtcagcatttgcagcgctctcttctgcctgactggctgatatgccggcattcctcgctgacgtctccgcctctccggcattcttcttcgcctcctcagcgtgacgcgccacctcttccaccatcagttcaaaacggcgcagagcctccggacgggcatcatcctccgtcatggcaccgagaaaatcattcagcgtaccgggttgagaatcttcatacacggtgatggtcccggcatgtgacggcgggaatccttccaccaacagaatgacgctgtactgaccgtactcaacgtccatgctgtaacgaccggcttcatccggattttcagaggccaccgtgctcaccaccaccgngctgctggtccgtctggctttcagttgaatggtrcagttctctaccggttttcctgtgccgtctttcagtacacctgaaatctttactgccatattcaccccacaaaaaagcccgcctgaamcggcgggctgtcataacactgtgttacctggctaatcagaacttataaccgacacccacgatgaaaccgtcagtgcgccagtcgccactgccggagccttcataagcrrcatcaacggccackgattcggtcgggttaaactgcacgccagcnccccacgccagagacgtgttgctgtggcgaccgtcatcacttccggtcagcacatcgtgcgttttccccttgttgtcagttacgcgragataatccccggagaaagtcgacacacggctgtaagccnnnnccgccatcgcatacgcgctgaaccattcattcacgcgcacagacggccccgccattacgctgaaccagcggttacgcacggaatcttcatgccagcgggtatcgctgtaacgggtannctggcgattcntgtctcctgcatagctgaatgacgtcaccagccccagygtgtccgtraaytcataacggtatttcacgttaatcccgttnagatcatcgctgccgggaacgttcgtcgagrcatgaagataccccgcgctcagcgtggactgatgttcagaygcccatgcaggcgcaccggatacnnycagacaratggctgcggacaaaatggcggcataaagtttacgcataattacctctcgctttnntnnnnnnnnnnnnnnnnnnnnnnnnnnnnnnnnnnnnnnnttataaaattcagctgatactgatrcctgctgtggattttttcatcaccacaaccagcagatcgctgatacttgctgtgggatannnnnnnnnnnnnnnnnnnnnnnnnnnnnnnnactccagcgtcatgtgaccgtgaccggcaggcatatcaataacgccactgtaaatcagcgtattatccagcgcgnnnnnnnnnnnnnnnnnnnnnnnnnnnnnccnnactatcagacggcatgaggagtanntatcagtatgctctctctcatgttnnnnnnnnnnnnnnnnnnnnnnnnnnntaacnntttgccggtcaaacggctgatcgtcataaaccctgacggtaatggtcnnnnnnnnnnnnnnnnccggnnnacgggaatcccgggggnnagctttnnccnnnnnnnnaacgagatcgccttcaatctggttcgcggacagttttcccagaacccgacagttctcgttaatcgtgacgttgttgagcgtcccggaattcgnnnnnnnnnnnnnnnnnntatcagcatttcttgcggtcagactgccctccggcgtcagggaaaacgtcgggggattgccggacgaggtgatactcaccgcaaacagccgcttcaggaacacatcgttcatgaacaactgattcccctgnnccacaaataacggcgtggtgttgccgtcctccgggttaatcatcgcaatacggtcagccagcagcagtatgttgctcaggggctggccatcagtatcctcaatccccgctccaataccggcaacatnngnnnnnnnnnnnnnnnnnnnnnnnnnnnnnnnnnnnnnnnnnncagccaggtcatcatttgtgtccttctgcacgcgctgtatctgctgtatggtggcgctctggtcttccagcgttttactgaccgtctgtgtgatttcattgcgggtttcggtgatggtggtcttcatctccgccatctcatccgcaagctggctgttgtctatcagctcccacagcccctgagccagatgcagttttcctattttttcccgnnnnnncnncagatacccttnnnnatcattgctggnnnnnnnnntggnntccacaaacgcagatttccccaccaggttgacgctgcgcacgtaaaaccagaaatccttccnnggcttaatgtgcgggccggatacactccactgactgccggtccccagataacgggcagaggtttccacctgagannnnnnnnnnnnttnnntntccgaaaaccagaactcaaactgtaccgtcgggtcatacaccgcaagacgcgggaccgctgttatctgaaaatagcccggtgtcagctcaatcgtggcgggtaccgcaggtgcattaatcctgaacgtggtggtggccggttccccctgctggccataactgttannnnnnnnnnnnnnnnnnnnnnnnnnnnnnnnnnnnnnnnnnggcagaccactgaaacgatgctctgtatccgcagtgatnnnnnnnnnnnnnnnnnnnnnnnnnnnnnnnnnnnnnnnnnnnnnnnnnnnnngcctgtgccagatactgaccgtcagccgcgctcacctccaccgtcaggtgctnnnnnnnnnnnnnnnnnnnnnnnnnnnnnnnnnnnnnnnnnacgctgttcagggtgcctgantgcggctcaaagctggnnnngttatccacgatggcttctttttccggtacgtgctgcnnnnnnnnnnnnnnnnnngtgcnntccgtgttttcccggatgganacacagcggaacaggcgnnnnnnnnnnnnnnnnnnnnnnnnnnnnnnnnnnnnnnnnnnnnnnnnnnnnnnnnnnnnnnnnnnnnnnnnnnnnnnnnnnnnnnnnnnnnnnnnnnnnnnnnnnnnnnnnnnnnnnnnnnnnnnnnnnnnnnnnnnnnnnnnnnnnnnnnnnnnnnnnnnnnnnnnnnnnnnnnnnnnnnnnnnnnnnnnnnngggtcacctcacggtccagtgtcnnngtgngnnnnnnnnnnnnnnnnnnnnnnnnnnnnnnnnnnnnnnnnnnnnnnnnnnnnnnnnnnnnnnnnnnnnnntcgttatcacagatttcaataatgtcaccgggtgtgtgacgcnnnnnnnnnnnnnnnnnnnnnnnnnccaccgtctgnntttccagcagtccggtctttatcacnnnnnnnnnnnnnnnnnnnnnnnnnnnnnnnnnnnnnnnnnnnnnnnnntcannaggttgcgcccgtnnnnnnnnnnnnnnnnnnnnnnnnnnnnnnnnnnnnnnnnnnnnnnnnngggtcttccaccagttccgtggaggtctgccagccgttctnngggnnggnnnnnnnnnnctccaccncnntgtggcggtccttcagggcnnnnnnnnnnnnnnnnnnnnnnnnnnnnnnnnnnnnnnnnnnnncacgccgttatcatccaccaccacannnnnnnnnnnnnnnnnnnnnnnnnnnnnnnnnnnnnnnnnnnnnnnnnnnnnnnnnnnnnnnnnnnnnnnnnnnnnnnnnnnnnnnnnnnnnnnnnnnnnnnnnnnnncataccggcatacagcgcatcgccgagcagaaatcactgagcacatcccatgccttacgctgttgtgacaggtacgcattaaangtcatccgcgnnnnnnnnnnnnnnnnnnnnnnnnnnnnnnnnnnnnnnnnnnnnnnnnnnnnnnatacagcgcccanttgtccacntnnnnnnnnnnnnnnnnnnnnnnnnnnnnnnnnnnnnnnnnnnnnnnnnnnnnaggcaccaggcngggttattgctgtatgccggtttcnnnnnnnnnnnnnnnnnnnnnnnnnnnnnnnnnnnnnnnnnnnnnnnnnnnnnnggatatggtagttcaccgtcatctgctgnccnccaaactgctccgcatccacctgcagccccacaatcgccgtgttcgggtagcactgtttcacatcgatgatttcggtgtannnngaccagagcgtcttattctgcagctggtccgaggtgctgtccgcngtctcccggaccatccgganntnaannnnnnnnnnnnngcagattatccagaatcaccgacgccagaaactgcgaggtggtcttgccgttaatggtgacatccttttccgtcacccagttaccgttacgctgcaactgaatcagcagtcggacagaagannnnnnacggtcgccctttgaggtggtctccaacagtgactgcaccccgaaggtgacccgcaggcggtcaatgttcgcggatgtaatggtgcnnnnnnnnnnnnnnnnnnnnnnnnnnnnnnnnnnnnnnnnnngaccgctgtcacaccatgtatcacaggattaccgtccgtgtccgtcagcggggttttgttcaccaggatactctgcaaccccttcaccggaccttcaatcggcccttcaccaatggcatcaatcacgctcatcatctgcgtggacttnagattntnnnnnnnnnnnnnnnnnnnnnnnnnnnnnnnnnnnnnnnnnnctgccgccacctttncccataatgttcctctcaattggtattattaatcgcagtgataggatattgcacagctattgcgcgatatcatcagaacgctgtttgttaccctgtaaccagcaagctcagtctgttaacggaattaatgagggttttatgaaatgtaaaatcattgctgccattgccatgctgacagcagcatcatgcggatacgcagcagaacaggaagtcccaatgaaccttgtcagtgctgacggaaaagaagtcagcattggaaaaataaccattcaggagaccccctacggtctgctgttcacaccagcccttcactctctgtctgaaggcattcatggttttcatgtgcacgaaaaaggaaattgcgccccggcactgaaagacggaaaaccggtcgcagcattatcggctggcggtcactttgacccgaaaaacaccgnnanannnnntggcccctggtctccggatggacacctgnnnnacctccctgcgctgttcgtgacgcatgacggaaaagcgaactacccggtcctggccccgagactgaactcattaaaagagattaaagggcgttctctcatgcttcatgctggcggtgataaccatcatgaccatccggagcccnnnnnnnnnnnnnnnnnnnnnnnnnnnngcnncatcattcaataatcagtcaggtaaggggcggnnnccttacctttattcctcaggacgataaatcctttctccctgaaaagaacggcacatcctccctctctgagttaatgtttttgtcgtgacataagaataattccttacactcaatcttcgtaacgctcccgcagttcctgtccgtgagcactgcgggattttttcgcttttatgcctgccgcccgataaccacnaccttnccnnnnnngccttcatcacgggtactgatgtcctgngagattcgccgggagccaaccagcatttccccgtaaggcaccggcatcgggttcccctgggcaatcatgttatccagcgaggaaaantacgtgttctgtctgccgttatccgttgcgcggtaatccggtgtttttgccttnnnngccagcatctgggccacaccgcccagnatnnnnnnnnnnnnnnnnnnnnnnnnnnnnnnnnnnnnnnnnnnnnnnnnnnnnnnnnnnnnnnnnnnnnnnnnnnnnnnnnnnntgatgccccggcagtgaagaacgancccacgatggctgccgnncccannannnnnnnnnnnnnnnnnnnnnnnnnnnnnnnnnnnnnnnnnnnnnnnnnnnnnnnnnnnnnnnnnnnnntntggatgancgttccctcacccagctgttngtgaagacgggcntacaccgcctccggtgccgtgtcatcaccggcaatacgtatctggtaccagccttcgttcatctgacggcggaatccnggcatctgcatcgacagggcacggatggcttccgctgccgtgttcacatacaggctgaggcggcggccaaatcgttgtaaatccccgtgaaggcagatncgtgccagtggcggtgacgccaggctgaatgcgttcgtcgttgccatttttcggaatacctctcccgtttactcagttgttcaggnagatgnnnnnnnnnnnnnnnnnnnnnnnnnnnnnnnnnnnnnnnnnngcggcatgattggccaccgatgcgccaaagcagcacagcaggatatcgcccggctgtgnnnnnnnnnnnnnnnnnnnnnnnnnnnnnnnnnnnnnnnnnnnnnntattgtccaggtanaggttctgaccnttncgccaccagtcatcctcacgctcaaaatccggcatatcaattcccgccagatggtatgcatcccggaacagcgtgtaacagtccgtcaccccgtgctcaaagcgccgtcctgtcagatgtggcacacagcggaatttatgaatttccccccggcagaccagccaccaggacagtgcactttttatctgcagccgccggtcggcctcgctcagccagggcagnccaccgggatgactgtggaccagtgnnnnaatctcnccctgcatctctgcccgcagccagtcttccggtgcaatacgaaaatacgcctccggctctgcagagatattcacacaagggatataccgctccccctccggcgttctcaccacgaagccgcacgactccgcaggcncacaccgccgggnnnnnnnnnnnnnnnnnnnnnnnnnnnnnnnnnnnnnnnnntttactgcgaaagtttattaatggaaaggaaaccgccaaaattagccaccatgccgcgcatctcacacccgcgcatgcacttgctgcatctgtccttacggatannnnnnnnnnnnnnnnnnnnnnnnnnnnnnnnnnnnnnnnnnnnnnnnnnnnnnnnnaggnnnncatggccgtcagctctgacatctgctccaccacccagcggtcgctcagctcctgctccgggtccgcttccggattgcccgccacaaaattcaccgcatccagaaaacgggcatacacccggcggcggaccaccgtggcccccaccaggctctgcaggtcctccgccatnnnnnnnnnnnnnnnnnnnnnnnnnnnnnnnnnnnnnnnnngattcgacaccgtcagcgacnnnnnnnnnnnnnnnnnnnnnnnnnnnnnnnnnnnnnnnnnngccaggtnaccgnctcccctttttcattcagctcattgcagnnnnnnnnnnnnnnnnnnnnnnnnnnnnnnnnnnnnnnnnnnggtgactgctctgatttaaccgactcgttcagactttcttcgtgaatatcctgcatcagttcaccacctgcttaaactcngcgctgaattcaacccgcagcatgcgaacccgtgatgaccaggcggcacaggtcacctttatctgccgccaggcataaggcggtgtccacagaaacgccttccagccaccgtgctctgccaggaatgcctccagatgtcgggcctcctcccgggtcacggaaagcgtcacacggtatgttttcaggtcagcattcagcccngccgccatacgctgngantacccgtcaccaaaacgcacttcacgcaccgatggctgcgagttcacctccatatccggcttcactttccagcggaaggttttcatcgtccgctccctgataacatannnnnnnnnnnnnnnnnnnnnnnnnnnnnnnnnnnnnnnnnnnnnnagccggagctcatcctgggcacccttgcgggccatgtcatacacngccttcatcakctgcgnncnnnnnnnnnnnnnnnnnnnnnnnnnnnnnnnnnnnnnnnnnnnnnntnccgtcgttctgaatcaccacgtgattgttctgattaaaattaatnccttcngcccgccgcatctgcgccggacttccggcaccncccacataaccaccttccgcatagccccgcatcaggcggtacaggttgccgacnccaatccggctggttgcytccttcgtgaagacaaaytccccnnnnnnnnnnnnnnnnnnnnnnnnnnnnnnnnnnnnnnnnnnntcccgtaaatcccccggtcgcnaaatggaagttcgnnnncgcagcctgaatggccgtccccgtggaggcagacgcnccaccaccgaaagcncnnccaatggcgctgccgatactcccgacaatccccaccattgcctgcttcagaaaaatctctgtcagcatgganagcacggaacgggtgannnnnnnnnnnnnnnnnnnnnnnnnnnnnnnnnnnnnnnnnncggtcagcatccccgccatattctgtgcaataccgtcaaaggtctgcgtggcngcacttttaacctgcgaaaaactgtccgtcgcactttccgcccactcgccccagccggacttnnnnnnnnnnnnnnnnnnnnnnnnnnnnnnnnnnnnnnnnnnncttccacgaagctgctcctccgcagaccaggtgttcttcagtgccgatgtggccttcgccagcgcagccggattatcaccgtacacgtcacgaaggcgctgctcttccgactcccgctgcgcctgacggtcggtgaggnnnnnnnnnnnnnnnnnnnnnnnnnnnnnnnnnnnnnnnnnnnnnaaccgcgnnncctgctgtgccagctcattcagccgtttctggtgttcaaccttgnnnnnnnnnnnnnnnnnnnnnnnnnnnnnnnnnnnnnnnngctggcgtttgtactccagcgtctcnnntnnnnnnnccagcagggatttttcctgctcagataactgccgtttcgtggctgcctctttcaggaccgcatactgattttccgctttccataaatcgcgacgctgctggctgattttctcattcgcaccgctgtgtttttccagcgtccggagctcggtttcaagcgccagcagggcagcatgcgcctggtcttcctgacgctcaccggctgacactttgactcctgacgacttcggctttttcagcgtcgattcataatcctttttcgccgccgccatcagcgtgttgtaatccgcctgcaggattttcccgtctttcagggccttattcagttcttcctgacgggcggtatatttctccagcggcgtcagcagacgctcatacgccttctgcgcctctccggtatacttcagctgtgatgcgtcccgttcggcccggtccctggcggccagttcaccggctttttccatatccgactgcagcgtggccgctgccagccccagacgggcattttcccggtcattccatgcgccctgcaggttggcccggaaagaggcggtttttccccggcgctggctccggctctggtaccactgccattttttatccgcctcatcaaatgccttctgtgcactggcgagcatatccgctgaggactcaggacgaccgatatccagaatggcatcccacatcgatttgaatgccttccctgttttatccgcccaggtctccagtgttcccatgttttctttcaggcgacgggtctgctcatcaaagcctttcgtggcgatatcgttcgccgcctnnnnnnnnnnnnnnnnnnnnnnnnnnnnnnnnnnnnnnnnnnnncgctgcagctgtgcaacatacgcaatctgctctgccgtcacgttacggaacnnnnnnnnnnnnnnnnnnnnnnnnnnnnnnnnnnnnnnnnnnnnnnnnnnnccacctccacaccggatgcagacgcaaaacgcgcgacactctggttgatggcatcaaactgttcaccaccacgcacaccggcattcaccagggctgccagtgactctctcgcctggttaaacgtcagccctgctgcctgcccggctcttgagagagtcagcatacgatcggcagtcagtccggactgattaccggaaagaacnagggttnnnnnnnnnnnnnnnnnnnnnnnnnnnnnnnnnnnnnnnnnnntaccaggcgtacaccagcgcacctgtcgccaccgccagcgaggtgaccccgaccatcggcagggtgatcgcaccggcaagccccctgaacatggggatcatcccgccgaaggagtccttcacctgaccgccctgttgcagcaggatcagccagggattctgaccaccggcaagctgcgtggcgatatccgtaaactgtgcgggcagggttcgcatggccgctttatactgcccgacggaaatcccggctttttgtgcagccagcgcctggcggctcaggccctgttcaacagcactggcggtttttctgacgtcggtatccagacctgaaaaatgacgccttacccggctcatctgctcatcgaaacggaccgcatccagactcaggtcaataacaagatcaccaaccggctgggacatatctcacacctcccggaatccccgctgaagccatcattaatgcggcatcatccaccatgacatccgccacatccgcagacgataaaatatcgcgccctccgtccccaccgaaccggacgcctccggcaagtcctgccgctttctgcatcagcattttgtcctcatccggcctctccacctgctcttcctcatgccgggggacaagcagactgaaatcagagggatgcatatccggatcgcannnnnnnnnnnnnnnnnnnnnnnnnnnnnnnnnnnnnnnnnnnnnnnaaaanngcatatccagntgggtannnnnnnnnnnnnnnnnnnnnnnnnnnnnnnnnnnnnnnnnnnnnnnnnnnnnnnnnnnnnnnnnnnnnnnnnnnnnnnnnnnnnnnnnnnnnnnnnnnnnnnnnnnnnnnnnnnnnnnnnnnccatctcacgcgccagtctgagggcaaaattcagctcgccgtcgaagactttcccgcagaaaaatcatcatcagtcagcgcgttatnnnnnnnnnnnnnnnnnnnnnnnnnnnnnnnnnnnnnnnnnnaatggcatccgcaggccaggtggtnnnnnnnnnnnnnnnnnnnnnnnnnnnnnnnnnnnnnnggcctcattcattgacggtnnnnnnnnnnnnnnnnnnnnnnnnnnnnnnnnnnnnnnnnncggatggttatgccacagggacatcgccaccagaaacgcgccggttctgacgagatcttccacgcttacctgcaggttgccgctggattctgcctgttctgcacgccgtttcaggagggcaagatgctcnatacgctgcagcgcagacaattcggaaagcgtgacagacacaccgttatattcaaattgttctgttttcagaaacatgtatgacctccgtttaccctgcagcgcccgcttcagtaacggtgacttcagccactgcggcgaactgaccatttccgctcaccacagggatctgcaccttacctgtcgccacgccgtttaccgtaattgtcatatctttcacactaatggtggctttcgacggatcnnnnnaaaccgctctgaacgtcttgtctgttgcactttccggctcaaaagaaaccgtcagggtggttgttttcccttttgccaccgtaccggatgtcggcgtcaccttaatcgcagtgaccggcgtaattttgctgcgttcttccgctacagaaggtttncccacgttngnnactntcaccgtgcgggtgatcacttctttcgccgtcacggccttaccgatactgctgacccagccacgaaacacatccaccgtgccattcggaaaacggattttataggcccggacatcgccgctttcaaaccagcctataagccctttctggccttcctctcccggtttccaggccagcgtaaaactggtatcacctgcagatttctgcccctgcccggtcgcggtccagtccgcgtcttcatcatccaggtagttatcatcgtaggattctgccgtcatctcgcccggcgtcagatccttcaccttagccagtcgctgccagtcatcgtctgacaacgggtttgcatangcntcacccnnnncgttgtaaacccacagagtggtaccggcaccttttaccggctcaaggggaattcgtgtttcggcttgacgtagcccggacgtaacacgcgggtttcactaccncgatgacgcagcacttttccttcaacaaccggggagacataggccgccaccggcgtttttccggtaattttgtccagcatcacctcttcggtatggaaattcaccgtacggcggaaaaacagctccagaaacagcgcacgaaatttcactttttgttcggtataaccgagtaactggcgggtcgtaaacaatcccataaatcagttcctttcattcagaaatcagtcaggccaccgcggtggcctgataacgtgttacggcagcgccgcgtgactcagggcactgccggcaaaggcatttgcctttttgtgttcatccacactgtcaggccagcggattgcctccgtcgcaaaggtccccgacttgtaatacgtcagtaccgtctctgtgccttcaagcggcagtaccagtatgccaaccgcactaccggctttctgtccgtcccagaccaccagtttcccggnagcttcatccagcatcaggggcgtcagtgccggtgttgccgaggaaatcccgctgctgcctgtggcggtatgagccggatcattaccggcaaaaatacgtacttccgcacgctgttcagtgatggttttcgttaccatattgtaaaaacctcctgttgatgatcagcactgacttcatggcatggccatgagcattttcacgtccgcatcaccgtctgctgacgtctgtggcacgccaccctgtaccgctgccggtgaatggttcgccatgatgcgttcaaacagggcggttgtggatgcagagaccggttctgccttacctgatcccgcagccagcacagcccgggcgctctccacagtcattcccgggcaggcagccagctgttcagcctgcgcctcagccccttttgcctcatccagtgccatgatctgatcacggagtgagggtccggcatccgcctgcggtgaagcagccaggatcgggcgggctttttccaccgtcatctccggcatcgccgccagcgttgccgccagttgttcacgaccgttcgcttcttcacacgccataatgcgatcggcttcactctgcgtggatgccaccggctgctgcggtgccgcnncggccagaatcgcccgggcctgttcaacgctcatgccctgttgtcctgccagcatcgtggcaagctgttcacgtcctttcgcttcctggcatgtcaggatccccatcactcgctggttctcctgcgcggcggcttccgttgcagttaattgcggcatagtgcctcctctgacattactgttcagcgccgtggccatcacactgatggcatccgacgcattgattaattcatccgccagcccggcctcaatgccggactgaccttcaaaaacggcggcctctgttcccgtgacggcatcaacagacagaccggtatacatcgccactttttcggcaaacatccggcgcgccgcatcaatgcgctgctgcatgtcctggcgaacctctgccggnaacgcttcaaactgattgccatccaccttgtgcgcccctgagtaaatcagcgtgatatccacaccggcctgcgccagatgaccggcatagctgacatggctcatcatcacgccaatggagccgatacgggatgtctgggtaaccagccgtcgggagcaggccgacgccagcagcatggctgcagaacaggccgtgtcattgcacagtgcccagaccggcttctgctgacggaggcggtaaatcatgtcagcgcagtcaaacgcgccggaggcctgcccgcccggactgtcaatgtccagcagtacgccccgcacctggctatctgccattgcctgctgaagacaggcgacaatgccgtcatagccagtcattccggaaaatggccgcatnccncccagccggtgcaccagcgtgccggtcaccggcagtacagcaataccgttcaccacccggtaaacacgggccggtcgtttacctccggccatgtactcgtccgtttcagccagcattccgggagcatcaagctgtacctgctgctgtggtaccgaaagacttgctncccccatctcgcgcccgagcgcgcannnnaaaacccncgcataggcgggctccagaagcagcggttcattgaatgctgcggcaataatgtgtgaaagattacgtctcacggggtgttgtctcctcttccggcctgcgactctccgctatctgctgctgatacgcctgcgctatccacaccggacgtgagagtccggctttttcccgctctgcagattccctgacctgctggcggaaaatgtcctgataatcctcgcccatcagcgccagctctttctcatacgtgctcagtccggcctcaatgcgcatcaccgattcctgaacctccttgagcccgtcaatggccattcttccggctccaatccactcngcccgtgaccaggctgatcgcgcctgataaaaatcaaaacgtgcccgtggcggacgaataatcccccgaagaagtgcctcttccagccagcaggaaaacatctgcgtggccagccgggacgcaataaattttcgccnccccataaaatancgccacgactcattggcggangcgngggcacttgaataactgaccttcgagtaatcacgggacaactgttcgtaggaaacgccaagaccggcggcgatataccgcagcagcgcctgttcaagcgcngaaaatccattgtctgaatcctgcgcggtctgaagtttcagatcatcaccggggaaaaggtgcggaattttgacaccgcccagcgtcacgctattcgtgtcataccaggtggagaacttatccagaatattaataagcggattatccttctgcccctgcggcgcaccggcgatatattcaaaggccttttcggtatcaaggtcactttcaatcgtcgctgcatacatcgccttcactatggccgactgaagctgtgttgcctgcagggaatcgagcatcttcagccgttccattacgctgtaaaactgattggccccacgggtctgcccgtcctccaccggctcgaaaatatgcagcatggccggacgcccggtgggaagttcacgcgggatccgttcccatcgtccactcccggagcgaggaaaatcatcctcacagatatggtacgcaacggcacgaccatatcgatcgacctccacaccggcccgcagaaaacggttccccataccgtgtcctggcgtgtccacccgtttcggactcacggctttaaaacgcgtacgaaacagttgcgtgctctccgtatcccagaccggctgcacaaagatttcgccgttaaacgcatgaacgcccacaccttcacgaataaattccgtaaacgtgcgttttccttccacgtcgatctcgccagacatcccttctgcgtattctgaccaggccgcctccacctcatcgacaaaactttttgccgcggtctcccgcatccccagccagcgccagttcggacggtagctgatcagaaacatatgcccgacaatatgatccttatgcagggccaccgcattggccgctatcccgttattgcgcaccagatcatctgcccgggcattccccagacgcaacgcaggcagcagggctgcatcggcactctgcgccggtggcaaccactccgccatttgcccgccaaatcctgcaccgcccccgttgtagctgagactctcacgaagcggaacgccgttcacatcaatcaggacaggcgttcgtttcataacctcactcccagcggacgacggcgacgccgggttgtccccagtaccgactccgcatcattgatcgcccggttaagctcatccagagaagccgccgtatattcaattctgcgaccatctttctggacagacaccacccgtttaccggttaataaatcaaggcgcgcctgacgcagcgcctgcagttcagcgactgtaaccattcactcctccggacagcttcgctgccagttctttcagggttggccgggtcgtctcttcttcccgggattttgccagtacagccagatcaagctgccagcgttgcacggacacacgtaatgccgcgtaggcatacaccaggcagtccagcgcttcgttacgccgctttttgttatcccacagcagacgcatctttcctttttcccacttctccacaagctcttccgctaccagttgctgcgcctctgtctgcgaaaaaatctccggatcatcaggaaaacggatggcatacgacgtggcttcatccgcaggcgtgggatcggctttcatacgggcatagagaatttcttttgcggtgtccgtccccacttcacacagatacacgccccgctgattgcgggttttcggcatggtgatcaccggcttgccatagacagacgcgccctttaccggcagcacccggaaaacaccgtgtttttttgatctctgataaacaatttcaccatcgatccccccggtgtcccagcagacacgggaaatagtcatttcggtgccatccgcatggcggtattttttgttgatcgccgcatccacacgtaacagcgtctcttcctcatcaggacgccccataatgatgattttatccaccagaaaggcttcctctcccggagcccatccccagacatacatctcaaaacggtttcgctgcgagtcaatgcccgccgtcagataaaccacccgggcaggcaccgccgccgtgtaacgcaccaccttatccatcagtacctggtgatcgagtttttcgcccacggcctcttcccaggtctcgcccagcgtggtgttcacaaaggttttcaggccgttgggatctttcagtgcatccagccagtcatagacaatctgtacccaggtggtgaacggactgtacgccgtccagatatggaacgtgatggagcgcggcggcggaatttcatcaccccgggcgctgaaaaacgtcagaccgtcacgggtccacatgcccgngttttcacagatccaccgcccgttactctggtcaagctcagactgatggatcacacagccatgatgctcacaaaggtagaaarcactttckggtctgtccttctcccatttaaggccaaaaggcgnggactcatcgccaaatttcagatactgctcctccccacagtgcggacagggcacataaaaacgcatgaagtgtgccgactcgttagcggctttttcgatctggcaggtgcctttgattttaggcgtngagccgcgaatggattttggccacaccgacccctcaatacgcttatcccccagcagggttggcgagccctctttttcgacatccggctcgaacgaggaaagttcgtcatagcagaccacgtccacggatttttcacggtagtttttggcggcagcgccgcccaggcaccagaaaccgacgccngatgaaaagcgtttcagcgtgagagtattgtcacgatgtttacgncccagccatggggaaaggtctttcaggcatggcacgttccgaatcgtcgcctccacgtgagacttcataaaatcttcagcggcagaatccgtgggctgaaaaagcagactgtttcgggatttatgctcaataaaatacccgaccacccccagcaacatctttgtatagccaacacgggcagatttaatcagnttaacmgtgcggatctgatcattccnnnnnnnnttcatratggcgatctggaatggcagcgttttccattctccctcaccatatgaagattctttaggcagataataattttgatcagcccattcaactgncgtcaccggcaatgcccttatcaggggctgtaatgcagtnnnnnnnnnnnnnatcatattattcagttgttgctctgatatattcatcnagtaaatccggtaatttatcccctgcccgcgcacactgatttgcccccttagcaataagggttttcagatggtcaagatggcgcggtgttaaatcaggaaactgtcgctgcatggataaagggatggaatcaagcgtactggataacgccattgccagcttactgagggcaaaaatacagaacccggtgtcaatnagttttccttttgacacctcattttttaactgctgtgtaacagcctgttctgctgtcagttcccatctggcaataagcaatttctcctcatagtcgtcttcgctatcgccatcaggcacatcgtttttacttctcctcagatacgatatgtaaaaatcgcgccaggcatccagatccagttgccctcgcttattcgatatcggggcacccggcaatttctgcaatctgcgaagctggcgatcggtcagacttaaatgcctggcaacttcagtctgcgtagccactcctcacctcgcaaaaactctcacctcacaatcacaacaaaaccggtcatgtccggtttacatgtctgttttttgttcatgtccggttcacagaagacctgtttttatatttttcatatagttaacttgcagagaaaccggacatggatcccggaaaattttcataaatagcgaaaacccgcgaggtcgccgccccgtaacckgtcggatcgccggaaaggacccrnaaaatgataataattatcatctacatgtcacaacgtgcatctacgccatcaaaccacgtcaaataatcaattatnacgcaggtatcgtattaattgatctgcatcaacttaacgtaaaancaacttcaganaatacaaatcannnncactgaatacggggcaacctcatgtcaacgaagaacagaacccgcagaacaacaacccgcaacatccgatttccaaaccagatgattgaacaaattaacatcgctcttgnnnnnaaaggttcaggnaayttttcagcgtgggttattgaagcctgcagaagaagattaattaatgaaaaatattctcaatttgtacccaacaaagacaaacacgaccagagcacctgttcagacaggtttacttaaangacttatatatgacacaaaaagcgaccactaaagtcgctttttcntatggtaacaggcaataactctctcagatattttttagcatttttttgaccgcgcgtttccggacgtattctgttctcctgtccctttatatcgtcggaatacccgccgctcttcaaatcccattcccaactcagaatgtagtctgttgaccgcttgttttatttctgtcaggttcatcggtgaaaccggagtccggcgcgccttacgcaaacactctgctcgtttctgtgccgccacttttcttttctggtcatcacttagctgtaccatcacttttgcccatcgttcagctgctctccggtacagtccttttttctccagacattctgccangtgatcatgtagcataagtgacctccgattatctacagactgcnatcctgaatttaccttccnttaatgaaataacaataaaaaataaatcacagaaaaacaanaaaacaacacacaaaaaaacnnnnnnnnnnnnnnnnnnnatcaccttattttattannttttgagnnagcnattactgaacaaaaaacgctgactatatactcaaaaccaaacaactattctgccaatcaggtatnatggcaacacanggaattaccgtgtttttgccttctctgcccatacaatacggncatatacttcatnctctattgtaatatttcnatccatgcgaacaacttcatttatctgtaaataatatncaaaatatttatcacagaaatcgtttttggccatgaactgagcacactataaagtccggaactgactctttgttaaattaccttaangttaccagtaacaccttcataacaaaacatcacggtatacactgggtacggatatattcctgtgctccttccagttgcttctgcattgncatcanccgttctctgaggatgaaataatcccgttcagcggcttctgccagtcgggggccggttgcattanccacgcyggaggtgatggggnntnnncgcaaggagcctggacagktggcgttgatccgcaggcgcttacgaccagcggcaacatcancacgcagagtttcantttcagctctcgcatcggctaattccctcgagtatctggcatcaagtgcagcnacatcacgctggcgtayctgcatatcagtaattgtcgcgttcgccagctccagctcactggcttttttatcgcgttgcgctttgtaggtnatggcgttatcncggtaatgattcagccccagactaagcncaccacaggcyaccagcaggacaataatcaccacacacagaacacggttcatannnnnnnnnnnnnnnnnnnnnnnnnnnnnnnnnnnnnnnnnnnnnnnnnnnnnnnnacacagaggctcttcaccagcgttatgnnnnnnnnnnnnnnnnnnnnnnnnnnnnnnnnnnnnnnnnnnnnnnnnnnnnnnnngacnngttnngccagcccatacagcatcggagacacagcaataccnnnnnnnnnnnnnnnnnnnnnnnnnnnnnnnnnnnnnnnnnagcaaaagccagcgctctgctnnnnnnnnnnnnnnnnnnnnnnnnnnnnnnnnnnnnnnnnnnntnncttgccttactcaaggtcnnnnnnncaaaaccccgcttgctgccaacaaacgggnttttacttttattcacttasgtttcgccagttcgcaggatttcgtgttatccacnnnnnnnnnnnnnnnnnnnnnnnnnnnnnnnnnnnnnnnnnnnnaatattctncttatctgtcgatwccccagcacgccagcgcgctctcctggtcacgncgngatacctgaccgtarcagttgtttgaacgaatacggcantctctgccaccgtccttaatccaccagcgaatcgcctcacangctcccctgcgatcaccagcattaattcgtctgtaaaacgtcgacgggaaacacttaccgggaccaatgttgtacggacagaatgacgcgatccccgctttctggggttcggtcagcggnactnnnnnnnnnnnntccacccnnnncagcgccttatcacgctcaatggcgttaacctggtcgcatttntccttcgacaacttcatgcccgggacgacaggyttaccatccaccagaatggcaccncgncagatggtccagatncccgnaccatcacggtatgcygtggtgtggttnccttccttttcatccagaaactggtcgaggatttcaggcgcagacgcccctgcaccaatcagcgccagaacggcagccgacaggccgtatctgatnnnnnnnttcatggatatttatcaggatttatcgatttctaatcccttgatatgtnnnnnnnnnnnnnnnnnnnnnnnnnnnnnnnnnnnnnnnnnnnnnnnnnnnnnnnnnnnnnnnnnnnnnnnnnnnnnnnnnnnnnnnnnnnnnnnnnncgtattttttcttcatcgctttacnnnnnnnnnnnnnnnnnnnnnnnnnnnnnnnnnnnnnnnnnnnctctctgattttgaaatacaggttagtcagatacgtcagcaggccaaacagcagactccccagcacaccgatygccacccactgggacggagagactttgtccagcagctgcagtaaccagtatcccgtccccaccgctgacgtggtgtatgacacaccngttgtgattttttccatctgatgtatgtctccgtcaccgccgacagaaaannnnnnnnnnnnnnnnnnaaaagccgccagtgtcacccactgacggccaacnccgggagccgtgattatggcattcaggctctgctaaaaatgccagataacattccggctccctcccctgattcaggttataaatgacacaatatcttgacaacanccgtcactgtctgtcagaaaatgtactgccaaatataagtatcatgtgaaatccaactatccttctnagnnnnnnnnnnnnnnnnnnnnnnnnnnnnnnnnnnnnnnnntntatctccagcatcagactttctatctcaacgccatacgctgcattttttgtaacatccgtcagcgtcagcgcattcagtcccagtgtcagactgtcttttataacctggaatgccggrccagccactccattcagtttcggagtnnnnnnnnnnnnnnnnnnnnnnnnnnnnnnnnnnnnnnnnnntgaacaccagctccagcgtcnnnnagtcgttaccgtaatcgccgaactcccccagcttcgtgtttccggctttcctgtgatgcatcagattcacnctgccgtcagtggtctgagtnaagtnnnncnnnnnnnnnnnnnnnnnngtacccgtyatcgycacaccatcaggaacgggagcatccgtatacagataaatccccagcccgaactgattgttggtcagtnnnnnnnnnnnnnnnnnnnnnnnnnnnnnnnnnnnnnnnnacnngtcagtctgccgccctgtgtcagcagggtaattgcgtcatccaccggatgcgtcagggaccaggttttattgctctgcntggtgatcttaaatacaccatctgacaactgaattccgccatccttaatgctccanccctnnnnagcagcctnnnnnnnnnnnnnnnnnnnnnnnnnnnnnnnnnnnnnnnnnnagattgtgcgaacggacgtatctgcagacggacccgatggcgtgtnnnngccgggnnnnnnnnnnnnnnnnnnnnnnnnnnnnnnnnnnnnnnnnnnnnnnnnnnnnnnnnnggctgcgttcagaatagcggttgccanacgatccggaatannnntcctnnnngcccatgaactgaaatgtgtcgggcggtttgatgatacctggtttccattcgttctcgatgccgcaccgtaatatcctgatgccggaatatccgggtcttcttccggtttgttcgtcgggacatttgctccgttctcatcggtcatgaacggcacaaagtgaatattcttttccgttttgtttttgtaactgccgtacaccgtctggtaagtggattcgctcttctgcttccagaaataagttgtgtctccacatatccagggaacaccgtcagcagaaccaccagcgcactgtcccaccatatctgcaaggtccgtacgatattgttccactacttctgtaaaacgggctgtgtgatttgctggcgttccgtcaaagtcaaattccccctgcatccacaccacggcaagcagcacatttttcgggttctttgccagcgcggcttttgtacgaccgatgagatccttatacagcggcctgcccacaccccagcgggtagaactctctgaggcaccggtcacgtcactgtatgttccatctgccccggtggtgaaagctgaaccaccacggcagcacggaaccagaagaatacccgcattcgccggtataaacggcagcagctttttggcaatatgcagcccctgccccacggttccgtactgacctttcgacaggtcagctttcggatggttaagacggctcatgtcctgtacatcatgcagacagtggtcwgccggaataatgtcgttatatttacagggagcgccatccggcgtcactgtgctgcgacgagccagttgctttatacgcgggtcaggacggtcatatgtctgcggcagaggaagcccctcaccgtaagccatgccgttcgactgcccggccagtggaataacgtagtaataatctggctccgtggtgaccactcccggatagccaccatcccccgtgccgggcacaaccactggcgtggtcacatccccctccgckgcaatcgcctgcatcagggtataaggggttatggccacaggactaccaaacggctgccagccctctttcagtttgtgtgtnngcttttccgcaagatctgacggcgacgccgccctgacaacatcataatgtttaatcgacatcgaatttctcccgtgtacaggaacagagttaaaaagccggaaccggaatcaaatcacaggannnnnnnnnnnnnnnngctggtnntaaaaaaaaggccgcgccatgcgcagccggaaatnnnnnnnnnnnnnngatagtnngagaaanacagnnnnaacacttttgtggcaaagcatggtgccgggtgcctcccggtgaattcagtaccagcacctgaatccrcgattatcccatatacctggttgctgattgccccaccgcacagggggattcaccatgcagtagtatttttaataaacagtaaacaaaaaaatcaagcattatgcaggctgtttctttttatcaccggccacagcaataccacaatgccgcagaccagccccccnnnnnnnnnnnnngacatgattctgctggtgaaannnnncatcaccaccagaaacagcaggagtgcagccacagccaggcgcagttttaccgtcacaggtrattctccagacgaagccccagaacaccggcaatctcttnnnnnnnnnnnnnnnnnnnnnnnnnnnnnnnnnnnnnnnnnnnnnnnntggccaccgccacatccnncacatcttccgcttcacgcgtatcgtgtttcacatcctcgatctcacgtaacgccncacgacgaccaattttaaagttcgtatccagctgaccgataatggttgcgctaatcgcattaatttctgacgtaaacgcggacagcgctggctgattacgcagtacctgttcgatcttcgctttctaggaagcctcacattcaccatctgcayaggccaccaggtatgcggcgttaatcaccgcctgtgccagatcgcgtttctcaaactttcctttttccggttaacgtgacacaccaataactcttgtcgaaaaagccagcaagctgaaagaccggtattcacaaccaccagcgcgtttactgtactggcgtgatttcagtcataaaaaaacccgcctggcgacgggtgtaaaaaatcttctaacgtcaggcataaaacgcccatcgttagggcaaatttaccacagattcgggaaaaatcaacaaagctatctggtcacctttttcagttgttgttctgcccatgcttcttcaatatcaaactgcaccaccagcgtatcgtaaaaacgtttaactgtttttttccatgtatcaagagatatggcatcggttacattacatatggcattaaatgcctccgttgaaggtaatctttcatagccacgaccaccacaacgctggcagtctctgataacaggcataccacgttttaccgactcttcacgatgaatggcaacaccgcgcccacgacaatctttacaggcggtggaaacctcccccttccctccacactccggacaggcaacttttaccacctccctgacttttttccattcctcccagtaagacggatacacgccttttgtgcactttgcccacactggcggcttaccatccggatactggatcttgtttgtaaaaacctcgctttcaataaatttttttccgtgacaacaggggcactgttttttgctcgccgcgctacgggcataatcttcaaacgcatacgaagccataatacgcatcactgccggttttatttctgccgggagttttcttaacgccgccacgcgatcacaccgactgagtgcatattctgtcagcaattctgttgcccgctctctgtcattcatactaatgcccattttcccaaggaacgcagaaaaccccatctcagcccaattctgtgtcatgccctgcgcggccatcacatcagtgatactcagcgtatctttcgacgttgaggccgatgcatcagtcaggccgggggattttggggagtagtatttcggtaaatcttccagtttcattttttgacctgcccttcaagcattatggggtaaatcttcacccccagacgtccaccagatactggctgagcacgaacgatattgatttcatcaaactgctcatcgtccattagcaaccccgcatgcgtcagcgcatccagcggcgctttcagaatattgtccaggtcacggnngcgcttatccggtggctcggcaataatctttatcnncagcnntccggacaggcttaatttcagccgctgctggcgancaatnngcgccacagcccggcgataacgctcaccggcttttgatnnnnnnnnngtgctgccacgacgtcgccagtaggtgttcaccgtcggcgggtaaagcaaaacaaactctatacgcatcagtaacctcttttacccgagcacgccggttgcaaaggcgtgatcaagaaaacgaaaaattaaatcaacctgggaaccatgctnntcttcgannnnnnnnnnntccgcatgnngctcgttgtgatgctcccgacacagcggtagcgtgaaaatatcgtgggattttgttcccattccgccctgaccatgaccaatcagatgatgaggatcgtccgctggcttaccacaacacgcacacggctgtgtctttacccagcgtgtgtatttnnnatttacccagcggcgacgtttaggtcgtnnnnnnnnnnnnnncggagannccggatcaacggcaatgcttaccaccgtcttttcctgtggcgggttttgctggtggnnnnnnnnnnnnnnnnnnagattttttgtgcgctgtttcagnatgctggtggctgtctgytctcccggtaygatgtcgctttcgcggtacnnnnnnnnnnnnnnnnnnnnacgtaaccccagagaacgacgtaatgctgcctctggtagcgcatccgccacctgattgcagaccgcccaccaggataattcacccagagataattcmcgctcctgcgtgccattcattgcatggcgtatgacgtcaatcatccatgctgacaaattttggtgagcaagttgcccgagtgattcggaggtctggtcacgcaactggttgtcgcagtgccagcacaacaccattgcgccggtaccataacggtgaatgacagtttcgctgtggtgataatcgccgtgtgnncactggcaggatttaatatggcgcaacagccagtcagacaatgcaccagcaccaccagcagcacgaatcannngnnnnnnncnnaaaaatggcagcaatgttttgtcttccaccagcggnnnnnnnnnnnnaggaacgaccccggacggcagattacgcatgcttttcggttccggctccaccagtacccgggtattgtgaaatacctgcatggattcacgacctggcttaagggccaccagcccgagttccggtaccagaacaggtcgaagtaatacccgcacgttacctccagatccgttgctggaatgtgcgggacggacgcggtgggcgttcggagtaaggaagcctgacggagattatccagtgacggtagtcgaggctgagggctttcttaatctcgtatccgcgcctgcggtaacactgaatcagccattcagcctgttcttcggtgcaggggtcgtgctgataccagtcagatntgaatgcatgagaacgccnnccgtgcctgctggcaggggcggcagagttatccgaattgtaaaatttggtatcgtgcgccatctgttttctctgctggcgcagcaggtgccagttgttcaggctgacggatggattgtaaaccagaacgaccagaaaaaacaaaacccgccgaagcgggttaagtgcgggtgcgttgaggatgcctgacacatcagcggtggcgagggatttctcccccgcctggtctcttactcctcaggttcgtaagctgtgaagacagcgacctccgtctggccggttcggattcgtacctcgcagaggtctttcctcgttaccagtgccgtcactatgacggttaaacagatgacgatcagggcgattaacatcgccttttgctgcttcatagcctgcttctccttgcctttcggcacgtaagaggctaacctacatttgtgagacatagattgggcctcagattaatgttaagcgtcttgcaggacgcgtaatgttaactggggcttttctctatctgccttttggtgttcatgcctgaggcagatagcctcaagcacccgcagcaattctacttaactctcgctttaccgcaaaccgtttttacccgatatgggaattcccatatcgtaatgaattcannnnnnnnntcganncatcaaaaacacaannnnnnnnnnnnnnnnnnnnnnnnnnnnnnnnnnnnnnnnaccttccattgccagnnnnatntnntccgacaaattnngttccctannnnnnnnnnnnnnnnnnnnnnnnnnnnnnnnnnnnnnnnnnnnnnnnnnnnnnnnnnnnnnnnnnnnntnnccnntganntatcatccgacatattccctcctttggtgttaatcccggcgaacgtttttacccccaccgacaaataacanntacnnaaaaagcgatagccatagcaacgcctgtaattgcaaatgcttcaggccagttcannggcgcacctcctgcggcggttctggtagaggcatccagtgtgatggtatccacgacgcaccaggtattatccacccatcattagcgtcaggatgccccgggatgtaagtcgcccatttcattcnncagtcaccttnnnnnnnnnaatccctggcaacaagaacggctgttttggtatccggcattcgctcactacagcttatccaactatccggagttaccggatagttgcccgatagtgcattctgctccagtgatgcttttacaaaccacgctgcctgaactataacgccatgaatnnnnnnnnnnnnnnnnnnnnnnnnnnnnnnnnnnatcttttcgccacttaaggccttgcttatgtggctgcgtaccaggtcttcatgtaattccttcgcctcctcaatggtgaaaccaccaggcnnnnnnnnnnnnnnnnnnnnnnnnnnnnnnnnnnnnnnnnnnnnnnnnnnnnnnnnnnnnnnnnnnnnnnnnnnnnnnnnnnnnnnnnnnnnnnnnnnnngcatggcttcgcggcaatcgttccagcctgtagcgtatgcannnnnnnnnnnnnnnnnnnnnnnnnnnnnnncctgccaatacatttcttccggcnnnnnnnnnnnnnnnnnnnnnnnnnnnnnnnnnnnnnnnnnnnnnnnnnnnnnnnnnnnnnnnnnnnnnnnnnnnnnnnnnnnnnnnnnnnnccctaatgggtaatgagctataatcnntgccaccggctctgcttccagcgannnnnnnnnaatccgtgccagttccatttgttnnnnnnnnnnnnnnnnnnnnnnnnnnnnnnnnnnnnnnnnnnnntcaatacgttctttggtaatannggtcatgtgttnctccttaacccgcannnnnnnnnnnnnnnnnggggaacaaaatcttttcatcaanncctgcattcatatcatgaacagcnnnnnnnnannccatcgacgaacgattatcaagagcctccnnnntttnntccatgcggcgtaggtcatacaggtaaatgcttttatcnncnntggtgnnnnnnnnnnnnnnnnnnnnnnnnngacagcgatcaagaacttcctgtaattcgttcaaccatgcccgtnnttnntttgtcaaagttgccatatcagttttccttatacggnnnnnnnnnnntnngcagtgtgnngaatgacgcccataccacgtcgttatacaattcaannacnnnnnnnnnnnnnnnnnnnnnnatccaggctaggattaacggggatatcggtatcatcaacacgatnnnnnnnnnnnnnnnnnnnnnnnnnnnnnttcnnctcttnngcggatattttttctaaataatgtgaccattcattaccgccctttcnnnnngcctcctgacattaatnnnnnnnnnnactcatagcttcatttgcagcatcaactggatcaacctcccnnnnnnnnnnnnnnnnnnnnnnnnnnnnnnnnnnnnnnnnnnnnncttcaggcgtccacggttcnnannnnntttttgccgcattctcatcgccnnnnannnnnnnnnnnnnnnnnnnnnnnnnnnnnnnnnnnnnnnnnntaatggctttctgtgtatttaannnnnnnnnnnnnnnngttaaggattanattttatnnnnnnnnnnnnnnnnnnnnnnnnnnnnnnnnnnnnnnnnnnnnnnnaccctgataganngccagtnnnnnnnnnnnnnnnnnnnnnnnnnnnnnnnnnnnnnnnnnnnnnnnnnnnnnnnnnnnnnnnnnnnnnnnnnnnnnnnnnnnnnnnnnnnnnnnnnnnnnnnnnnnnnnnnnnnnnnnnnnnnnnnnnnnnnnnnnnnnnnnnnnnnnnnnnnnnnnnnnnnnnnnnnnnnnnnnnnnnnnnnnnnnnnnnnnnnnnnnnnnnnaagtgaattttgtgatgcgnnnnnnnnnnnnnnnnnnnnnnnnnnnnnnnnnnnnnnnnnnnnnnnnnnnnnnnnnnnnnnnnnnnnnnnnnnnnnnnnnnnnnnnnnnnnnnnnnnnnnnnnnnnnnnnnnnnnnnnntaccaacgtcaacggcgaagacatgacggagattgaggagaatatnnnnnnnnnnnnnnnnnnnnnnnnnnnnnnnnnnnnnnnnaacacggcagcgaaaaaccngtaacgcnnnnnnnnnnnnnnnnnnnnnnnnnnnnnnnnnnnnnnnnnnnngttactgccctgnnnnnttcccnnnnnnnnnnnnnnnnnnnnnnnnnnnnnnnnnnnnnnnngacaaagttttccctaatcccggtaattcagacctgggactgataactgcttttttcgangcatacctggacgctgactacacngatcggggtctgctgacaaaagagtggatnnnnnnnnnnnnnnnnnnnnnnnnnnnnnnnnnnnnnnnnnnnnnnnnnnnnnnnnnnnnnnnnnnnnnnnnnnnnnnnnnnnnnnnnnnnnnnnnnnnnnnnnnnnnnnnnnnnnnnnnnnnnnnnnnnnnnnnnnnnnnnnnnnnnnnnnnnnnnnnnnnnnnnnnnnnnnnnnnnnnnnnnnnnnnnnnnnnnnnnnnnnnnnnnnnnnnnnnnnnnnnnnnnnnnnnnnnnnnnnnnnnnnnnnnnnnnnnnnnnnnnnnnnnnnnnnnnnnnnnnnnnnnnnnnnnnnnnnnnnnnnnnnnnnnnnnnnnnnnnnnnnnnnnnnnnnnangaagaaaaaccncaaccatcnnnnnnnnnnnnnnnnnnnnnnnnnnnnnnnnnnnnnnnnnnnnnnnnnnnnnnnnnnnnnnnnnnnnnnnnnnnnnnnnnnnnnnnnnnnnnnnnnnnnnnnnnnnnnnnncgctggatgctcagtcgcagnnnnnnnnnnnnnnnnnnnnnnnnnnnnnnnnnnnnnnnnnnnnnnnnnnnnnnnnnnnnnnnnnnnnnnnnnnnnnnnnnnnnnnnnnnnnnnnnnnnnnnnnnnggtgaatttgttganggnattagcgacccnaatgatccgaaatgggtcaaggggatccagactcgcgannnnnnnnnnnnnnnnnnnnnnnnnnnnnnnnnnnnnnnnnnnaacaggaaccggaaaaagtctgnnnnnnnnnnnnnnnnnnnnnnnnnnnnnnnnnnnnnnnnngggcgacgcaacataccaggaaacattcggtgaagagaatcaggttgaagctaaggaaaaagatccggaggaaatggaaggcgctgaacatccgcacaatgagaatgctggcagcgatccgcatcgcgattgcagtgatgaaactggcgaagtcgcagatcccgtaatcgtagaagacatagagccaggtatttattacggaatttcgaatgagaattaccacgcgggtcccggtgtcagtaagtctcagctcgatgacattgctgatactccggcactgtatttgtggcgtaaaaatgcccccgtggacaccacaaagacaaaaacgctcgatttaggaaccgctttccactgccgggtacttgagccggaagaattcagtaaccgctttatcgtagcacctgaatttaaccgccggacaaactccggaaaagaagaagagaaagcgtttctgagggaatgcgcaagcacaggaaaaacggttatcactgccgaagaaggccggaaaattgaactcatgtatcagagcgttatggctttgccgctggggcaatggcttgttgaaagcgccggacacgctgaatcatcaatttactgggaagatcctgaaacagcaattttgtgtcggtgccgtccggacaaaattatccctgaatttcactggatcatggacgtgaaaactacggcggatattcaacgattcaaaaccgcttattacgactaccgctatcacgttcaggatgcattctacagtgacggttatgaagcacagtttggagtgcagccaactttcgtttttctggttgccagcacaactattgaatgcggacgttatccggttgaaattttcatgatgggcgaagaagcaaaactggcaggtcagctggaatatcaccgcaatctgcgaaccctggctgactgcctcaataccgatgaatggccagctattaagacgttatcactgccccgctgggctaaggaatatgcaaatgactaagcaaccaccaatcgcaaaagccgatctgcaaaaaactcagggaaaccgtgcaccagcannaattnnaaataacgacgtgattagttttattaaccagccatcaatgaaagagcaactggcagcagctcttccacgccatatgacggctgaacgtatgatccgtatcgccaccacagaaattcgtaaagttccggcgttaggaaactgtgacactatgagttttgtcagtgcaatcgtacagtgttcacagctcggacttgagcccggtagcgccctcggtcatgcatatttactgccttttggtaataaaaacgaaaagagcggtaaaaaaaacgttcagctaatcattggctatcgcggcatgattgatctggctcgccgttcaggtcaaatcgccagcctgtcagcccgtgttgtccgtgaaggtgacgagtttaatttcgaatttggccttgatgaaaagttaatacaccgcccaggagaaaacgaagatgcccctgttacccacgtctatgctgtcgcaagactgaaagacggaggtactcagtttgaagttatgacgcgcaaacagattgagctggtgcgcagccagagtaaagctggtaataacgggccgtgggtaactcactgggaagaaatggcaaagaaaacggctattcgtcgcctgttcaaatatctgcccgtatcaattgagatccagcgtgcagtatcaatggatgaaaaggaaccactgacaatcgatcctgcagattcctctgtattaaccggggaatacagtgtaatcgataattcagaggaataattcagcctggcggnnnnnnnnnnnnnnnnnnnnnnnnnnnnntatgagaaaaattatgagatatgacaatgttaaaccatgtccattttgtggttgtccatcagtaacggtgaaagccatttcaggatattaccgagcgaagtgtaacggatgcgaatcccgaaccggttatggtggaagtgaaaaagaagcactcgaacgatgaaataaacgaaccactggaaataataatggaggtgttcatgtataaaattaccgccactattgaaaaggaaggtggcactcctactaactggacaagatattcaaaatctaaactaacgaaatcagaatgcgaaaaaatgctctcaggtaaaaaagaagcaggcgtttccagagagcagaaagtaaaactgataaattttaattgcgagaaacttcagtcctcgtgaattgcattgtattcaaattaaaacttcatagctgattattaataatcaacatcgggcgtcaatttaagtctaacattggcgcctgccagaggtgatgcgatggcacaagtaatctttaatgaagagtggatggttgaatacggcctgatgcttcgcactggtctgggggccagacaaattgaagcataccgccagaactgttgggtggaaggcttccacttcaaacgagtatctcctttagggaagccagacagtaagcgagggattatctggtataactatccaaagataaatcagtttatcaaagactcatgatatgtctaaattaccaacaggtgtcgagattcgaggtaaatacattcgcatctggttcatgtttcgaggaaaacgatgtcgggaaacattgaaaggctgggaggttactaacagtaacattaaaaaagccgggaatttaagagcgttgatagttcatgaaatcaattccggtgagtttgagtatttaagacgttttccccagtccagcactggggcaaaaatggtgacaacgagggtcataaaaacgttcggggagctttgtgatatctggacaaaaattaaagaaacagagttaacaacaaacacaatgaagaaaacgaaatcacaattaaaaacactcaggataataatttgtgagagtactccgatatcgcatattcgttatagcgatatcttaaactaccggaatgaactgctgcatggagaaacgctttacctggataatccaagatccaacaaaaaaggaagaaccgtgcgcacagttgataactatatcgccctgctctgttcgttgttacgttttgcgtatcagtcgggatttatatcaaccaaaccatttgaaggagtaaagaaattacagagaaacagaataaagcctgacccgttatctaaaacagaattcaatgcattaatggaaagtgaaaaaggacagagccagaacttgtggaaatttgccgtatactccgggcttcgtcacggggaactggctgctctggcgtgggaggatgtggatttcgagaagggagttgtgaatgtcagaagaaacctgacgatactggatatgttcggtcccccaaaaacaaatgcggggatccggacggtaacactactgcagcctgctcttgaagcactgaaggagcaatacaaactgaccgggcatcatcgcaaaagcgaaatcactttttatcatcgggagtacggcagaaccgaaaagcaaaaactgcattttgttttcatgcccagagtgtgtaacggaaaacagaaaccttattactcggtaagcagtttgggtgcgagatggaatgcagcagtaaaacgtgctggtattcgccgccgtaatccgtaccatacgcggcatacttttgcctgctggctgttgacggcaggagcgaacccggcntttatagccagccagatggggcatgaaactgcgcagatggtgtatgaaatttacggtatgtggattgatgacatgaacgacgaacaggtagccatgttgnatgcgcggttatcgtagttgcaaagtttgcccccaatttgccccatttagtaccagagaactgaaataatgaaagaaaatcaacaaattacaaagaaagaacaatacaacctgaacaaattacaaaaacgcctgcgtcgtaacgtgggcgaagccattgctgacttcaatatgattgaagaaggcgatcgcatcatggtttgcctctccgggggtaaagacagctataccatgctggagattctgcgcaatttgcagcaaagcgcgccaatcaatttttcgctggtggctgttaacctcgatcaaaagcaaccgggcttcccggaacacgttctgcccgagtatcttgaaaagctgggcgttgagtacaagattgttgaagagaacacttacggtatcgtgaaagagaagattccagagggcaaaaccacttgctcactgtgttctcggctacgtcgcggtatcctttatcgcaccgcaacggaactgggggcgacgaagatcgcgttgggccaccatcgtgacgatatcctgcaaacgttgttcttaaatatgttctacggcggcaagatgaaaggtatgcctccgaaactgatgagcgatgatggcaaacatatcgttattcgtccgctggcctactgccgcgagaaagatattcagcgatttgccgatgcaaaagcgttcccgattattccgtgcaacctgtgcggttcacagcctaacctgcaacgtcaggtgattgctgacatgttgcgtgactgggataaacgttatccagggcgtatcgagacgatgttcagcgcgatgcagaatgtggtgccgtcgcatctgtgcgataccaacctgttcgatttcaaaggcatcacccacggttctgaagtggttaacgggggtgatctggcgtttgatcgcgaagagatcccactacaaccggcgggctggcagccagaagaagatgaaaatcagttggatgagttacggctgaatgtggttgaagtgaaataactcggatagcgcccgatgcgcaaacgtatcgggctactctaatggaggctgaataagacgcggtcagcgtcgcatccgacaatcccgacgaagatgtttacttttgcatcaggcaattcaacattttattattttaataaccgcacccggcacgtttttcctttaatcttcccgccctgtaactgtttccatgctttatgagcaacagcctgacggaccgcgacatagacatgcgccggatgcacggcgattttgccaatatctgcgccatcaagcccgatatctcctgtcagtgcacctaatacatcacccgggcgcattttggcttttttcccgccatcgatacacaacgttgccatttctgcttccagcgtcacaatggaactattagctggtggcgtttgccagttaagttttatctgcaacatgtcagaaatgatattggcccgctgtgcttcttccggagcacagaaactgatcgccagaccgctatttcctgcacgagctgtacgaccgatgcgatgtacatgaacttcagggtcccacgccagctcaaagttcaccaccagctcaagcgatttaatatccagaccacgcgcagcaacatcagtcgcgaccagtacacgggcgctaccgttagcaaaacgtaccagggtctgatcacgatcgcgttgctccagatcgccgtgtaatgacaatgcactttgccctacttcattcagcgcgtcgcagacagcctggcaatcttttttggtattgcaaaacaccacgcaagaggatggctgatgcaagcttaataaccgttgcaacagaggaattttgcctttgctggatgtctcataaaattgttgttcaatgggtggcaaagcatctgttgagtcaatttcaatcgccaaaggatcgcgttgcactcgtccgctgattgcggcgatggcttccggccaggttgccgaaaacagaagcgtctgtcgagatgcaggcgcaaaacggatgacatcatcaatggcatcgctaaatcccatatccagcatgcggtcggcctcatccatcaccaaagtattcagcgcatccagtgataccgtgcctttttgcaggtgatccagcaaacggcccggcgttgccacgataatatgcggcgcatgttgcaacgaatcacgctgcataccgaacggttgaccaccgcacaacgtcaaaattttggtatttggcagaaaacgcgccagccgacgcaattcacctgccacctgatccgccagttcacgcgtaggacacagcactaaagcctgggtttgaaatagcgacgcatcaatttgctgtaacaagccgaggccaaaagccgccgttttgccgctgccagttttcgcctgcacgcgaacatcttttccggcaaggatcgccggaagnncggcggcctgcaccggcgtcatggttaaataacccaactcattaaggttcgtgagttgggcgggaggcaaaacattcagggtagaaaaagcggtcacaatctattctcgtggtcatcgacgcaaagtcatcaggcgcgtatcctcgcagatctacgctcacgatgcgacaatttaatcggttcttcatcgggtggtgggtcaggcatgggttgcgggcgagggatcggatcgggcactggaacaggatcgccaggaatcggttcagggacaggaatttgcaaataaataagtgtcgtcatatttccctccggtcattgggtggactcttaaagggtagacgctgataaataacaggcaaaaaaaagccgactcatcaaagtcggcgtcgtacgaatcaattgtgctatgcagtaattcaaaaaaggaagtaagacaatatggagcgcaacgcccatcgcttgacgttgcattcacctgcaagagagatattgccctgaatgggtagagagtttattgacttcgctcaaactttgcggcgtttttgtatacagacagccggaaaaattgcttttgttacaaccatttactacgatgcaaccataaagcaacaccaccaataagaacaactaacagaatacaaaaaattgaaaatccgaattgccacccgccgccagggatcccaccaaggttgacgccaaataaccctgtcagaaaggtactgggtaaaaagaccattgccatcaatgacattgtataggtacgacgagctaaattttcctgcatcacctgagcgatttcatccgccatcacaccagtccgtgctatacaggcgtcgatttcgtcaaggccgcgcccaaggcgatcggcaatatcctgcatccgacggcgttggtcatcgctcatccacggcaaacgttcactggcaagacgagcataaacatcacgttgcggtgccatatagcgacgcatcacaattaattgtttgcgcagcagagccaggaatccacgcggcggaatttgctgatcaaggagattatcttcaaggtcgataattttatcgtgcagctgctcgataaattcgctggaatgatcggtcaacgcatcgcacacatccaccagccatcccccgcaatcggtcggacccgtgccctcttccagatcactcaccacatcgtccagcgccagcactttgcgttgtcgggtcgaaacaattaaccgcccgtccatatatacacgcatggcgaccagttgatcggggcgttcatcggtgctgccgtttatacagcgcaatgtaatcagcgtgccttcaccgagacggctgactcggggccgtgtgctctcgcccgccagcgcatcacgtacgttattgggaagcagcggtgttgtcgccagccattgggcgctatcatggtgtacataattaaggtggagccagcagggatgcgcttcatcaatcacatctgtattttccagcggtttaacgccgcctctaccatccagcatccaggcaaatactgcatccgggacattaacgtccgatcccttaatcgcttccacagtgcctccatcatcaacgcattattttgtagtctagccttctggccctgttacgcaacatctcatcaccccattaccctgaaatgattaataaaattctgtctaaattgaatacaaaaagcaaaatgcttttccgtatacaaaccgtgtgaagtgttaaatagcgtctatcattatcagaattatctgatcatatgacgtggcttttttgcgatcggatagcaacaaaaattgataaaaataatgggatctcaatgattacgcacaacttcaatactctggacttactcaccagtcctgtctggatcgtttcgccctttgaggaacagttaatttatgccaacagcgcggcgcgactgttgatgcaagacctcacgtttagtcagctacgaaccggtccctattccgtctcctcacaaaaagaactgccgaaatacctctccgatctgcaaaaccaacacgatattatcgaaatcctcactgttcagcgtaaagaagaggaaacagcattaagctgtcggcttgttttgcgagagctgacagaaacagaaccggtgattattttcgaaggtatcgaagcgccggcaacgctgggtttaaaagccagtcgctcggcaaattatcagcgcaaaaaacaaggttttnnnnnncgcttttttctgactaactctgcaccaatgttgttgattgacccgtcacgagatggacaaatcgtcgatgctaacctcgccgcgctcaatttctatggttataaccatgaaacgatgtgccagaaacatacctgggaaataaatatgctcgggcgtcgcgtcatgcctatcatgcatgaaatctcgcatttacccggtggtcataaacctctgaattttattcataagctggcggatggttcgactcgtcatgtgcagacctatgccggaccgattgaaatttatggcgacaagctcatgttatgtattgtgcatgatattactgagcaaaaacggctggaggagcagctggaacatgctgctcaccatgacgcgatgaccggattactgaatcggcgacagttttatcacattacggaaccaggccaaatgcagcacctcgccatcgctcaggattacagcttattgctcatcgacaccgatcgttttaaacacattaacgatctctatgggcattctaaaggtgatgaggtgttatgcgccctcgcccgcactctcgaaagttgcgctcgcaaaggcgatttggtgtttcgttggggaggcgaagagtttgtcttattactaccaagaaccccactggataccgcgctttcgctggctgaaactatccgcgtaagcgtggcaaaagtgagtatttcgggcttaccacgctttaccgtcagcattggtgtggcgcatcacgaaggaaatgaaagcatcgatgaactgtttaaacgcgttgatgatgctttgtatcgggcgaaaaatgatggacgcaaccgcgtgctggcggcataagccacggatgcgtctcgagatcaacgactgcgcttagcgtggcgctcccagttttcttgctttgcctgtgccgttttacgtagtgcgacgtaacacgccccgctgccgccatgatgcggtagcgcggtacaatatgcctggacatcatcaaattcggtcaaccagcgcgccacatagctgcggacaatattggcatgcgatttatcatcccgccctttaccatgaataatcagcacgttacgcaaaccatccgccatggcttgttgaatgaaactgaacatcattttgcggcactcttccaccggctggcgcaaaagattcaggctcgcctgttgcggatatttaccactgcgcagcttatccagcaccccatgttgcaacccttcccgccgaaactccagcggctgacttagcgggatgatgtcgagaaatccggtggtgaggaaattatcaagttgcagcgtgtcgatacgctgcggcgcacgttggttacgcgttggatgccagtggacatcggtagcacgtttcagcggctggacatcttccatggcgtcaagaaacagcgatttgtcgtcaaggttcatgttacatcctcccgcaattaagagcgcgatatgataaccagaccgggtcggtccaacaacgtattacccaaaattccagtaataagttccaaatattgnnnnnnnnnnnngcaaaatgcttatgcatgattattcattcacgatattaataatgtaacttatattttcgtgaaatctgtcactgaagaaaattggcaactaaaggttaaaaccgttataacacagtcaccggcgcagaggagacaatgccggatttaagacgcggatgcactgctgtgtgtactgtagagtctggcggatgtcgacagactctatttttttatgcagttttaactttgcagatagccgcattctcgccggaattgcgtgattaatgacgcggtcagtggtgtctggcgactatcacgccgctgaatcaaataataggccgctttcggtaaaatttcgctaaccggcaacatcaccagcccctgtccgtgcaagggatcgcagcccatttcttcaggcagtatgctgagaaaatcgctttttgccaccagactgatacaggctgagaacgtctcgcagactacaccgacctgtggcgtttgcgcctgatcgtcaagcaattcactcaactgtttgtagtagctgccgtgtggcgtcggcattgtccagctgtaatccagtaactgtttgatcgaacgggcaccaatggcggggtgtcccgggcggcaaaagatcgcgaattgcttttccagtaatttctcaaaagtaaattcgtggtcgtacggtccctgataataggtattgatggtgaaatccaattctccctgacgcaattcattaatcatcgacaccagttgcccttccataatgcgtacttttacctgcggatgctgctgatgaaaacgagatatgacagctggcatcagactgcgggaaatactggcccccatgccgatattaatctgccctgccagttgcccttgtcgttggcgaatatcctcttgggctgcgcgcagttcttcaagaataagactggcgtgctgataaaaactttcaccggcatcagttaacgtcacgcctttactacggcgaaaaaagagttgcgccgctaacccttcttccagctcctgaatagatttactcagtgccggttgcgacatattcaacattcggctcgctccgcgaatgctgccctgacgagccacttcaacaaaagcccgaatttgatgaatttttacctgaaaagccatgacgccaccgataaccgttatttatcagaccaaagaaactggcatctactttaatgcagatgattgtgtcagggtaatttatgaacggttaaaactgtgaaaaatcagttagtgataagtaaaaactatcgctacgtgaaccgggtcacactttttactgatgacgggaaaggttatggagtctttgaatcaatttgttaattcgcttgccccaaaattatcgcactggcgacgtgattttcatcactatgcagagtctggctgggtggaattccgcactgccacccttgttgcggaagaattgcagcagctcggctactcactggcgctgggccgcgaagtanttaatgaaaatagccggatgggactacctgatgaactcactctacaacgcgaattcgagcnnnntcgtcaacagggtgcgctagcacaatggattgcggcttttgaaggtggtttcacgggtatcgtcgccaccctggataccggtcgccccggtccggtgatggctttccgtgtcgatatggacgcgctggatctcagtgaagagcaggatgtcagccatcgcccctaccgcgacggttttgcgtcatgtaacgccggaatgatgcatgcctgtggtcatgatgggcataccaccattgggcttgggctggcgcatacccttaaacaattcgagtccggactacatggcgtcatcaaactgatttttcagcctgcagaggaaggtacgcgtggcgcgcgggcgatggtcgatgcaggtgtcgtagatgatgttgattattttactgccgtgcacattggcactggcgtacctgcgggcaccgtggtgtgcggcagtgataattttatggcaaccaccaaatttgacgcgcacttcaccggtaccgccgctcacgcaggcgcaaaaccagaagacggttacaatgccttgttggcggcagcacaagccactcttgcactgcatgcaatcgccccgcacagcgaaggagcttccagagtaaacgtgggcgttatgcaggcaggaagcggtcgtaacgttgttcctgcctcggcgttgctgaaagtggaaacacgcggggccagcgacgtcattaatcaatatgtttttgaccgtgctcagcaagcgattcagggcgcagcaaccatgtatggtgtcggcgttgaaactcgtctgatgggtgcagctaccgccagttctccttcgccgcaatgggtcgcatggttgcaaagtcaggcggctcaggtcgcgggggtcaatcaggccattgaacgtgttgaagcgcctgcgggttccgaagatgccacattaatgnnnncccgcgtgcagcaacatcaagggcaagcctcctacgtggtgtttggcacacagctggcggcaggtcatcacaacgaanaattcgattttgacgagcaggttctcgctattgccgtcgaaacgctggcgcncaccgcgctcaattttccctggacgcgaggtatctgatgcaggaaatctatcgttttatcgacgatgcgattgaagccgatcgccaacgttataccgatattgccgatcaaatctgggatcatccagaaacacgttttgaagagttctggtcagcggagcatctggcttcggcgctggaatctgcaggcttcaccgttacccgcaacgtaggcaatatcccaaatgcctttattgcttcgtttggtcaaggcaaaccggttatcgccctgctgggagaatatgacgccctggcaggtttaagtcagcaagcaggttgcgcgcaacctacatccgtgacgcccggtgaaaatggtcacggttgcggacacaatttgctgggaaccgccgcctttgccgctgcaatagccatcaagaaatggctggaacaatatgggcaaggcggcacagtgcgcttttatggttgtcctggcgaagaaggcggctcgggtaaaacgttcatggtccgcgagggggtatttgatgatgtggatgcggcactcacctggcacccggaagcctttgccggtatgttcaatacccgtacgctggcaaacattcaggcatcatggcgctttaaagggatcgcagcacatgccgcgaattcccctcatttgggacgcagcgcccttgatgccgtaacgttgatgaccactggcaccaacttcctcaacgaacatattattgaaaaagcgcgcgtacactatgccatcacaaatagtggcgggatctcgcccaacgtggtccaggcgcaggcagaagtgctttatcttatccgcgcccccgaaatgaccgacgtgcagcatatttatgatcgggtcgccaaaatcgccgaaggtgcggcattgatgaccgaaaccacggttgaatgccgcttcgacaaagcctgttccagttatctcccgaatcgcaccttagaaaatgccatgtaccaggccctatcccattttggtaccccggaatggaactccgaagaactggcttttgcgaaacaaattcaggctacgcttacctccaacgatcggcaaaacagtctgaataatatcgccgcaaccggtggcgaaaacggcaaggtttttgcactacgtcatcgtgaaacggtactggcgaatgaagtcgctccatatgccgccaccgataacgtgcttgcggcatcgactgatgtcggcgacgtcagttggaaactgcctgttgcccagtgtttcagcccctgttttgccgtcggtacacccctacatacgtggcaactggttagccaggggcgaacatctattgctcataaaggaatgctgctggcggcgaaaactatggcagcaaccacactcaatctcttcattgattcagggctattgcaagaatgccaacaagagcatcagcaagttacggacacgcaaccgtatcactgccctatcccgaaaaacgtgacaccgtcacctttaaaataacaacaacaacgcaaacacaacaaccgaggaatgcccatgagtatgtcatccataccgtcgtcctcccaatccgggaagctctatggctgggtcgaaagaattggtaacaaggttccccatccttttttgctctttatctatttgattatcgtactcatggtgacgacggcaattttgtcggcctttggcgtcagtgcgaaaaacccgaccgatggtacgccggtggtggtgaaaaacctgctcagtgtggaaggattacactggtttttacccaatgttattaaaaactttagcggttttgctccacttggtgcgatcctggcgctggttttaggtgccggtctggcggagcgcgtcggcttactgccagcactaatggttaaaatggcatcgcatgttaatgcccgctacgccagttatatggtgctgtttattgcttttttcagccacatttcttccgatgcggcgttagtgatcatgccaccgatgggtgcgctgatttttctggcggtgggcaggcatccagttgcaggtttactggctgccattgcaggcgtaggttgcggctttacggctaatttactgattgtcacaaccgacgtgttgctgtcggggatcagcacggaagcggcagctgcgttcaatccgcaaatgcacgtcagtgtaattgataactggtattttatggccagctccgtagtcgtactgacgattgttggcggcctgataaccgacaaaatcatcgagccacggttaggtcaatggcagggaaacagcgatgagaaactgcagacattgaccgaaagtcagcgttttggtttacgcatagcaggtgtcgtatcgctactttttattgctgcgattgcgctgatggtgatcccggaaaacgggatattgcacgatccgattaatcacaccgtgatgccatcaccctttattaaaggtatcgtgccactgatcattctttttttctttgttgtctcgctggcttatggcatcgctacccgcacaattcgacgtcaggcggatttaccgcatttaatgattgaaccgatgaaagagatggcgggatttatcgtgatggtttttcccctcgcccagtttgtcgccatgtttaactggagcaacatggggaaattcatcgccgtggggctgaccgatatcctggaaagttcagggcttagcggcatcccggcgtttgtcggtctggcgttgctttcctctttcttatgcatgtttatcgccagcggttccgcaatctggtcgattctggcccccattttcgtaccaatgtttatgctacttggctttcacccggcatttgcgcaaatcctctttcgtattgccgactcatccgtattgcctttagcgccagtatctccttttgttccactgtttcttggattcctgcaacgctacaaaccagacgcgaaactgggtacttactattcgttagtcttgccctatccgcttatctttttggtggtatggctgctgatgttgctggcgtggtatcttgtgggcctgccgataggtccgggtatttacccacgtttgtcttaagagagaacggatgctgagattacttgaagaaaaaattgccacaccactgggtccactgtgggtgatttgcgatgagcaatttcgcctgcgggcggttgaatgggaagagtacagcgaacgcatggtgcagctgctggacatccattatcgcaaagaaggctatgagcgcatttctgccaccaatccaggcggtttaagcgacaagcttcgtgaatattttgccggtaatcttagcattattgatacgcttcccactgctacgggggggacgccatttcagcgcgaagtctggaaaacactacgcactatcccctgcgggcaggtaatgcattacggcgaactggctgagcaattgggccgtcctggcgcggcgcgtgccgttggtgcggcaaacggatcgaatcccatcagcatcgtcgtaccttgccatcgggttattggccgaaacggcaccatgaccggatatgcaggcggagttcagcgaaaagagtggttattgcgccacgaaggttatcttttgctgtaaacattaaacaatttgtgccagcttgttcacacttttatgtaaagttacccttaacaacttaagggttttcaaatagatagacatatatttacatctaatatcggaattctctgctgttaaggtttgcttagacttacttgctccctaaaaagatgttaaaattgacaaatatcaattacggcttgagcagacctatgatcccggaaaagcgaattatacggcgcattcagtctggcggttgtgctatccattgccaggattgcagcatcagccagctttgcatcccgttcacactcaacgaacatgagcttgatcagcttgataatatcattgagcggaagaagcctattcagaaaggccagacgctgtttaaggctggtgatgaacttaaatcgctttatgccatccgctccggtacgattaaaagttataccatcactgagcaaggcgacgagcaaatcactggtttccatttagcaggcgacctggtgggatttgacgccatcggcagcggccatcacccgagcttcgcgcaggcgctggaaacctcgatggtatgtgaaatcccgttcgaaacgctggacgatttgtccggtaaaatgccgaatctgcgtcagcagatgatgcgtctgatgagcggtgaaatcaaaggcgatcaggacatgatcctgctgttgtcaaagaaaaatgccgaggaacgtctggctgcattcatctacaacctgtcccgtcgttttgcccaacgcggcttctcccctcgtgaattccgcctgacgatgactcgtggcgatatcggtaactatctgggcctgacggtagaaaccatcagccgtctgctgggtcgcttccagaaaagcggtatgctggcagtcaaaggtaaatacatcaccatcgaaaataacgatgcgctggcccagcttgctggtcatacgcgtaacgttgcctgatttttccgcataactcactatccttctgtcatatcattaaatttttctgatttattgatctggcagaaggttcatcactgtttcattcaccagatatgggttaatcttttaattacaaactgcgttgacagttgttgtaaggagaccctgtatggctatgtatcagaacatgctcgttgttatcgatcctaaccaggacgaccaaccagcattgcggcgagctgtttatttacatcaacggattggtggcaaaattaaagcctttttgccgatctatgacttctcatacgaaatgaccaccctgctctccccggacgaacgtaccgctatgcgtcagggcgtcatcagccagcgtacagcctggatccacgagcaggcaaaatattatctcaatgctggcgttcccattgaaattaaagtggtctggcataaccgtcctttcgaagccatcattcaggaagtgatcagcggcgggcacgatttggtgctaaaaatggcgcaccaacatgaccgtctggaagcggtgatttttacgccaacggactggcacctgttacgcaaatgcccaagcccggtgtggatggtgaaagaccagccgtggccggaaggaggtaaggcgctggtggcggtgaatctcgccagtgaagagccgtatcataatgcgctcaatgaaaaactggtcaaagagacgatcgaactggcagaacaagtcaaccataccgaagttcatctggttggcgcttatccggtaacgccaattaatatcgcgattgaactgccggaatttgatccgagcgtttataacgatgccattcgtgggcaacatttgctggcaatgaaagccctgcggcagaaattcggcattaatgaaaacatgacgcacgtagaaaaaggtctgccagaagaggtgattcctgatttggcggagcacttacaggcggggattgtggttctgggcacggtaggacgcaccggtatttcagcagcattcctcggcaacacggcggaacaggtgattgatcatcttcgctgcgatctgttggtcattaaacctgaccagtatcagacacccgttgaactggatgacgaagaagacgattaacgactcctcaataactgacaaggcccgagttatcgggcctattttttacttactgctcttcgccgccaaggaaataaattcccaacgggattgccagcaacacagtaaagaccaggctataaacaaaaatcatcgatgactgaatcacatacattgatgtcgtccactccgacagcggaatattgtactgttctataacgccgccgatagtcgcgcgagtcacaaccgacgccgcaataatgaaaaccgccaacaaaccaaagagaaatttcttccctttcgctgacttcagtttcgccataatcatgatgtaatccttgtgcagacaaatttcttgttacctaaacgtaacaataccatgacatttcaccattgtctgctctgaaaacctcacctcttagctggatttacaatcaacgcattgattagttagctaatgttgctacttccttccctgactattgatgatctgaatgaattgtcgcggtaaaatagccccgccaggggtttccggcatgacgacaattatctggaggagcctgataaaacaatgatcgctgaactgtttacaaataatgcgcttaatctggtcattattttcggtagctgcgcagcattgattctgatgagcttttggtttcgccgcggaaatcgtaaaagaaaaggctttttattccatgcggtgcaatttttaatctacaccataattatcagtgctgttggtagcattattaattatgttatagaaaactataaactcaaatttatcactccaggcgttatcgattttatctgtacgtccctgattgcggttattctgacgattaagctatttttgctgattaatcagtttgaaaaacagcagattaaaaagggtcgcgatatcaccagtgcgcggattatgtcgcgcattatcaaaatcaccattattgtggtgcttgttctgctttatggcgaacatttcggcatgagcctttctggcttgctgacctttggtggtattggtggtctggctgtcggtatggctggcaaagatattctgagtaatttcttttccgggatcatgctctatttcgaccgtcctttcagtattggcgactggatccgttcaccggacagaaatatcgaaggtacagtagcggaaattggctggcgaattaccaaaattacgacctttgataatcgtccattgtacgtaccgaactcgctgttttcatcgatcagcgtagaaaacccaggacgaatgaccaaccgccgcattaccacgaccattggtttacgttatgaggatgcggcaaaagtgggcgttatcgtcgaagccgtacgtgagatgctgaaaaatcacccggccatcgaccagcgacaaaccttactggtttatttcaaccagtttgctgactcgtcattgaatattatggtttattgctttaccaaaaccacggtatgggctgagtggcttgctgcacagcaagacgtttatttgaagattatcgatattgtacagtcacacggcgcggactttgccttccccagccagacgctgtatatggataacattacaccgccggaacagggtcgctaaatcagacatcactggcgttatccacaagggtaacgccagttcccatcacatcaatgcttcacaatatacatagtccgactgtacgccacatcctcagggttattaataggataacctttcagccacggtttgattaatcgtccattggtatattgataaattggtgcaatcggtgcttgctccatgaggattttttctgccgcgttgtaatcggcattacgcgctttaacggtattttccgtcgatgcctgggccagaactttgtcgtatgccggattgttaaagcgtgaaatatttcctgaatgcgttgacgttaataatgtcaggaaagtggagggttcattataatcccccacccatgaggcgcggataacatcaaaattgccggtgttacggctatcgatataggttttccattcctgattttgcaatttaacatctacgccaaggttctttttccacatcgatgctacagcaatcgcaattttttgatggttttctgaagtgttatacaaaagcgtcagcttcagcggtttttgcggaccataaccagctgcgctcaacaaagtttttgcctgcgcattcagttcttcctgactcatttgttcaaacggcgaaggttccggcgtaaatccggcggtaacatctggtgtaaaatgccacgctggcttttcgcccgtccctaatactttttcggtcatcaggcggcgatctatcgtcatacttaatgccagacgaacgcgctgatctgccgtcggccctttttgcgngttaaacgcataataataggtcccgagctgcggcggcgtataaacctgccccggaatatccttcaacagcttctgatacatatttttcgggaaggattcggtgatatcaatatcccccgcgaggtaacgcttagtggctgcggattcctgattaattggcaggaaggtcactttttgcagtaccgttttggcgttatcccaataatgggtattcggtaccacgaccagtttttcattgactacgcgctctttaagaacataagcgccattgccgatcagatttccgggtttcgtccactctttaccgctttctacgttggctttttgcaccgggaagaaggcaaagttagcggttaaattcacaaaccacggcaacggtttatcaagctgaattttcaaagtatggacatcaactgcggtgacgccaagctggtcaggtgtagctttaccatcaataatcgcctgtgcgttgttgattcccgccagcgcggcaaaccatgcaaatggcgatagcgttttcgggtccaccagacgctgccagctgtagacaaaatcttgcgccgttaccggtgtgccatccgcccattttgcgttatcgcgcagggtaaaagtccagatacggttgtcattacttttccactgagtcgcaacgccggggacaatctcccctttctcgttctgattcaccagtccttcaaacagatcgcgaatgacctgaatctctggcaggcccacggctttagcgggatccagcgacgcaggctcatctttaatgtggcgcaccagctcctgcttctctgccagtactgtgccgctcggaacttctgcagcatacgaaagagaaatgctgctgaccaacagcgcacaacacgtgactgaaacagagtgcttcataagtttccctctaaccgacattaaaattgatgcgtaattatttgtttcgccttaaagaaatgcaaacaacttccatcagaaagtgacacagnnnngcataaaatgttttatgtatcaatatattaaatcagatttagtgtaaataatagacgccaaaatgcggcaaagcacatagaacaccgaacactacgttcgggcttcacacgttcaaaccagttttcggtatcataatcagcatctgtcgccattgtacgaagaataaaaaataaccaaaacgttgaaaggaactgagaatacgttaagagaagaattaaattaatgtatcagcaagtagtgctaaacagcacctttatacttcagcctatctataaataatgagaatgccgagccagcatgtcgacggtgtggatagtacaggtgataaccgggtaaatctggtgtgaatttatccaaaacacgtatcagttttttttctttaatcgcccgctcaacctgatcataaggtagatacgccaatccatgcccatcaattgcagcatcaatgatcaggtctatcgtattcagtaaaagctgaccttccatgcgaacacgaacttcacgtccaccgcgtattaatctccagcgatttgctgtacccgatgtgggaagatacaaattaattgcctgatgatctattaattgtgacactgacgttggaacacttcggcgagaaaaataatccggtgagccaacaatagccattggtatatctggcccgattcgaatggcgatcatatctttatccatctccccacccagacggacgcctgcatcaaaacgttcagaaacgacatcagtcaaaccataatcaatgataagctgaatatcaatttcagggtgtgatttcaggaatgtgcgcatggctggtaacaatatcgtttttgctgcatgttctacagtagtaatacgtattgtcccggatgggcggttctgcagatcgctcagggatgccagggcagaatctatgtcatgcagcatagggccaagaacagacaaaagatgctcgcccgcttcagtgggtacaacactgcgcgtggttcgcgtcagaagccgcaatcccaatcgttcttctatacggcgcactatctggcttaaagctgactgcgccatgctcaggcgggctgctgcgcgagtgaagctacgctcctctgcaacgacgacaaacgccatcagatcagcgatctcttcacgcttcattcagtatctccatacaatctattaatcatttaantgataggtctaatcatgatttagggtctaatcaacttaatgatcaatatctatagtgatatcaccaaccgttaaaacgaaccaacaactccatgaggaacggaatgatgaataataaagtcagcttcactaacagcaataatccaaccatctctttgtctgcagtgatctattttcctccaaaatttgatgaaacccgtcaatatccggcaattgtggtatctcacccaggtgggggcgttaaagaacaaacggccgggacctatgccgaaaaactggcggaaaagggatttgtcactattgcttatgacgcatcttatcagggtgaaagtggcggcgagccgcgtcagttagaaaacccatacattcgtactgaagacgtcagtgccgtgattgattacctgacaacgctttcttatgtcgacaatacccgaattggtgcgatgggaatttgtgccggtgcaggatatacagccaatgctgcaattcaggatcgccgcatcaaggccatcggtaccgttagtgcggtcaatattggttcgatgttccgtaatggttgggaaaacaatgtgaaatctattgatgccctgccatacgttgaagcgggttcaaacgccagaaccagcgatattagcagcggagaatacgccattatgccactggcaccaatgaaggagtccgatgcgccgaacgaagaactgcgtcaggcctgggagtattaccacacccctcgcgcgcagtatccaacagcaccgggttacgctactttgcgcagccttaaccagattattacctatgatgcttaccatatggcggaagtgtacctgactcagccgacgcagattgtggcgggcagccaggcagggagcaaatggatgagtgacgacctgtacgatcgggcatcaagccaggataaacgctatcacattgttgaaggcgcaaaccatatggatctttatgacggcaaagcctatgtggctgaagcaatttcagtattagctccgttctttgaggaaactctgtaatgaaacatattcaaatccgcaatagtgatatggcctggcatattgctgccaatattcagtttccaccaaattttgatgagtcaaaacagtatccggcgattatcagcgtccatccttttggcagttgtaaggagcagacgtctggcaatatctatggcaaggcattggctgaaaaaggctatgtcgttctcgcttatgacgccagtttccagggagaatctggtggggagcctcgttggatagaagatccgacacagcgcgtagaggatattagccgtgttatcgattatgcagtaactctgccatatgttgatgctgaacgcattggcgtgctgggtgtgtgtggggggggggtggctatgccattaatgccgcgctgacagaaaaacgaattaaagctgtagtgagtattacgggtgttaatatcgggcgtctttttcgggaaggtttcagcaattacgatccgattggcgcattgaatgcaatggcgtcgcaacgaaccaaagaggctcgtggtggagaattacagatcaacgaattacttcccgccagcctggatgcagcaaaagcccatggactgaccgaacgcgatgtttatgaagcaactgactactataaaacaccacgcgggcaacaaccgggaggtgcgacaaaaatgttgttctcacatgcacagaaaacgctggcctgggatgccttcgcatttactgaagtgttactgactcagccggtgatggtagtagttggtgaaaaagtcggtgccttcggtgcttatcgtgatggactggaagtctatggccgggcgatggtttcgcaggatcgtcagttagtttcattacccgatttctcacattatgaactgtatgacaaaccggaagcagttcaggaggcgctggaaaaagttattccttttttcaacacccatctgtgataagtttcatgagaaatattatgaaaaatgtactcattcttggtgctggcggtcagatagcccgccatgtgattaatcaactggcagataaacaaaccattaaacaaactttatttgctcgtcagccagcaaaaatacacaaaccctatccaactaatagccagattattatgggggatgtactgaatcatgcagcactgaagcaggccatgcagggacaggatattgtgtatgccaaccttacgggggaagatttagatattcaggcaaattcagtgatcgctgcgatgaaagcctgtgatgttaaacgtctgatctttgttctttccctcggcatttatgatgaagttccaggaaaatttggcgaatggaataatgcagttattggtgagcccctaaaaccattccgcagggctgcggatgcaattgaggcttctggactggaatatacaattcttcgccctgcctggctgacggatgaagatattattgattatgagcttacctcacgcaatgaaccattcaaaggtacgatcgtatcacctaagagtgtcgcagcattaattacagatatcatcgataaacctgagaaacacattggtgagaatataggcatcaatcaacccgggactgatggcgacaagccattcttcatgtaaatcaattatataaccaccatcgtactgtactatgtgcagtacgatttattaaacttattaaggtgaactgatcaatcagatgcgattaacatgtgtagaaccagtaagaataaaatacgccatgtatataacattacgacaattctaatatctgcacatcaatgaaaatacaaacaacttccggcaaaaaagtgatacaagatcgatgacatagcgttgaagaaaaggatttgataatccgcaaaatttgcacaacactgcctgtaatacttcctgaaccagagacgatcatgaccgtaacccgcccacgcgccgaacgcggcgcatttccgcccggaacagaacattacggacgttcattattggncgcgccgttaatctggtttccggcccctgcagccagtcgcgaaagtggtttgattctggctggcactcacggtgatgaaaactcttcggtcgtcacgctctcctgtgctctgcggactttgacaccttctttgcgccgccatcatgtggtgctgtgtgtgaatcctgacggctgccagctggggttacgggccaatgctaatggtgtggatttaaacagaaactttccggcggcgaactggaaggaaggtgaaacggtttatcgctggaacagcgccgctgaagaacgtgatgtcgtattactgacaggtgacaaacctggctccgaacctgaaacccaggcgctgtgccagcttatacaccgcattcaacctgcctgggtggtctcattccacgatccactggcctgtattgaagatcccagacacagcgaattaggcgaatggctggctcaggcgtttgaattgcctctggtaaccagcgtcggttatgaaacgcctggctctttcggcagttggtgtgcagatctgaacttgcattgcatcaccgcagagtttccgcccatctcctccgacgaagccagcgaaaaatatctctttgcgatggcaaacttgctgcgctggcatcctaaagatgcaattcgcccgtcgtgaactgaagcgccggttccacatctaccgccagccaggtcggtccgtcaagatcggcgaaactgacctgcggcaccagcggtaaagcggcgctaatggcccgagaggtacacaacatgcagcccagcatcagactgaaaccttgtgcacgcgcttcagtcgccagcgccagcgcttccgtcagacccccggttttatcgagcttaatattaaccatctcatagcgccctttcagcgccttcaaattgctacgagtatgacaactttcatcagcacaaatcggcaacggatgaataaaattctccagcgccgcatcgtcctgcgcaggaagcggttgttcaagcatcgcaacgcctaaatccgccaatagctggcaacgtgccgccaacccttctgcacgccaggattcatttgcatcaacgatcagcgtggtatcgggcacagctgtgcgaattgccaccatccgctcactgataagatggttatccatcttcactttcagtaatttcgcgccggcctgccagagtgttgatgcactattggccatctgatcaggcgtaccgatgactaccgtctgtgcagtgataactgtctcgggaagcgttatgccgatcaaatcagccagcgattgctgctgttttcgcgcggccagatcccacaatgcacaatccagcgcattacgtgctgcgccggcagggagaattttttgcaactcctcccgtgtcagccctttctctaattgcggcacgacgctcataatttgcgccattaccgaggcatcactttctccataacgcggatacggcgtgcattcgccggtgcctttaataccctcttcttccagttcaaccaccaccacgcgcgcttcactgcgacttccccgggcaatcacaaacngggtatgtaagggccaggcttcctcaaataccttaacggttctcatctttactccttggtgtcgcggtggtctgcggattaagcgcaaatagcgtttgctgtgttattgacagttagcataaactaggtgtgacgttaactatatgtaaacaggaaagataatcatgtcacaaaccgttcatttccagggcaacccggttacagtcgccaattccatcccgcaggcgggtagcaaagcgcagacttttactctcgtggcaaaagatctgtctgacgtcaccctcggtcagtttgcgggtaaacgcaaagtgctgaacattttcccgagtattgataccggtgtttgcgccgcatcagtacgtaagtttaaccaactggcaaccgagatcgacaacaccgttgtgctgtgtatctctgccgatctgccgttcgcccagtctcgtttctgcggcgcagaaggtctgaacaacgttatcaccctctccactttccgtaacgctgaatttctgcaagcctacggtgtggcaattgctgatggcccactgaaaggtctggcagcgcgtgccgttgtggttattgatgaaaatgacaatgtgattttcagccagctggtggatgaaatcaccaccgagccggattacgaagcagctctggctgtactgaaagcataagttaatatgcctgatggtgttgcaccatcaggcatattcgcgcttactcttcgttcttcttctggcttaagccatattcccgcaacttattggcaatcgcggtatgtgaaacgccgagacgttttgccagtttgcgcgtgctgggataattgcgataaagctgggttaataccgagcgttcaaaacggctggtgatttcgtccagcgaaccttccatcgcatcttcgcccacggctaccgttgcggcgtcataatccggcaacaaaatatcctgtggacgcagctcataaccgtccagttgtgtcagtgcgcgatagatagcgttctttaactgccgcacatttcccggccacgcataacgcgtaagtacagtattcaggtcagcggccagtttcggacgcggcacgccctgctcgtcggcaaagcgggcgacgaacagctcagttaacggcatgatgtcctgcggacagtcacgtagcggcggcaggttgagcgtcaacacgttcagacgataatagagatcttcacggaacatgcctttttgcaccagttcgaccagattcttntgcgtagcgcaaatcacccgcacatngacatgcacctcatggtcttcgccaacccgacggaaagtgccatcattaaggaaacgcagtaatttcgcctgcatccgtggtgacatctcacctatttcatccaacagcaccgaaccaccgttcgcctgctcaaagaatcctttcttcccttccggagcatgaccaaacagctcactctcgaccgcatcttccggtatagacgcacagttcagcgccaggtaaggtttgctcgntcttgggcttgcctgatggcaggcgtaggcaaaaagatctttacctgtacctgtgtcacccgtaatcagcagcggcgcgcttagcatcgccagtttctgcgcctgttcgacaacatgcttcattttcgggctgacagcgacaatttgactgaaggcgctgacgtcctgggcggcgacattttgcaactgacggcccatacgaatcgttgatcgcaacatcaccaccgcacctgtcaggacgtgttgatcattttcatcctgaagataaacaggcgtaatctccatcaggaagttctgtccattaataacaacatgctcgttatgggaatcttgcggttcgctttccagccaacgtaaaaaattaaagccgttaatcaattgtgcggcggtatggttgcgcagtcgatccaatttttgcccaaaaagctgacagctcgccgggttcgccatatccactttgcttttcatatcgacagagagcacaggttcaggcaacgcctccagtaacgcgctcaacgccagatgctcacgttcggaaggcatccacgggacagtacgcacatcggtaacacctgcaatacggcgtatttcggccatcagactgctgaaactctcaaactccagttcagcaaaattgaggtagattcgcccaatgggatcaatctcaataccgcgtaaatcaatgcctcttagcacgagtagatcgagtaattcgcgggtcagaccgagtcggtcttcacaaaagacttccagacgcatgggaaccttcacctgaaaaaagaacaattaatatgatgatatgacactatttgaatagcaggaaggtttctgtcaacaatcattgacacaaagacggaaaaacgggcacttcggcgtaaagatatccggtcagcacccgatattgcattatttttcgctgggcgttttgcctttttgcagcgtttctttcacctgaccgataagctgacgacggaaatccccgaggcgaggtttgtcatcgtcaatccacggcagcgggcggcaaagctccatagctttaatccccagtcgtgccgtcagaagtcctgcaccaatcccctgagctgcgcgggtagacaaacgagcagcgagatcttgcgacatccagtccattcccacttcgcgcaccaattcgctggctccggcgaaagcgatattcagcaataccagcttgaacaggcgcaaacggctgtaatatcccagttcaatgccatacagcgtggcgatgcgattaatcaaacgcagattgcgccaggcgataaatgccatatccaccagcgccagcgggctgaccgcaatcatcaacgttgattcagctgctgagcggctgatttcgcgccgcgcctgggcatctaaaaccggctggaccagatgagcatacaggctgaccacttcacgatcgttctgcgtttcatggattgaggcataccagcgttgcagcgctggatgagactgatcaatacccgcctgctgcgccagtttttcgcaaaatgcgcggcctttgcccgtgccgtggctgtgcaacaaatcgcgcgcttcgtcgcgttcatgggcgcgctgtcgcaagcgccataagcgccgccactctgttaccacagaacctacgccagcgccgataatcaatgccccagcagcacatccacccagcgccacccagtcctgagtttgccaggcattcattgtccactgtacaccctgcccgacaacgcttgcgccaaacagagccagcccgcccatcaccattttgcgccacaggctgcgtttcggacgtaacgctgcgtccattaccgcttcgacttgcccctcttcttcctgcgcttcgtcgagcgtggccggggcaaaannttgcgcctgattttcgtcaaaggtctgctgcgccctgaattttggattctgttcgacctccagcggaccgtcgaaatcaatacgtggttttaacggttcggtcatcgcaatttatctcctattaaaaattccagcgcggcatcaagacgaatatgcggcagcggtttgtcgacatccatcacctgcgggcgaaacgcttcaaactggaacccttgcttatcccagaacgcctgaccaggcaaacgtgcgggaacttcgccaggataaacagtgagcggtgcgccatcgctaagtcgattaccgcgcagcgccgggattttctcaccgttaacatcaataatgccactggtggtcgcctgaactgacgccagccccaggcaatccatgctgatcccttcgaacgccgcattttgccaggcatcctgaattagttgttgcagcaatgaaaccatattggcgtgctgatcgatggtcacatggtccgctttagtggcagcaaacaatagcttatcgataaccggcgaaaacaaacgcctgaacagggtacgctgcccatagtggaaactttgcatcagctgcgtcagcgccagacgcatatcattaaatgcctgtggcccactgttgagaggttgcaggcaatccaccagcacaatctggcggtcaaagcgcagaaaatgattcttatagaaccccttcaccaccttctcgcagtaataattaaaccgctcgcgcagcattccggcattggtgtgcttatcggcctgcgccagtttggactcgccccaggcatcgacatccggccacgggaagaattgcagcgcgggcgcacctgccatatcccccggcaagacaaagcgcccaggctgaataaagtgcagcccctgctgtttacagtggtggagataatcggtccacgcggcggcaatgtctgccagccggttttcgtcggcaggcgctagcgggtccagcccttcgcacatcattcgccatttcgccgaccattcgccgcgctggccattgagtaagcccgtcatctggcgcgaccagcttaaatagtcctgcgccagcatcggcaggtcgagcaaccattcgccagggtaatccacaatctccagatacagcgtggaggtatccttaaagtggcgcagcagcgaatcgttcgatttatagcgtagtgccaggcgaatttcgctgacgccgcgcgttggcgtcggccaggcgggaggatcgccatacagctgcgccaacccttcgtcgtaggtaaaacgcggaatgccaaagtcacgctgaggaatgcgttttacgcccagcagacgctcttcacgcaccgcacttaatagcggcaaacgtgctccggcatgaatattgagcaactgattgaccatcgcagtgataaacgccgttttgccgctgcggctaagtccggttacggcgaggcgcagatgtctgtcgacaccccgattcaccagcgcattaagttcatttttaagtcgcttcattgctgtcctgtgctgctctgaagaccagaaaaaaatcattcataaggatatgaatgtgggggccaggccattgattatcaactacccgtgttgtcatcgacgggcgaactccataagatgtgcagcattcacgttcggacggagttcctgacctatgtcccctactatttatgatattgccagggttgcaggcgtatcaaaatccaccgtatcacgcgtgctgaataagcaaaccaatatctccccggaagcgcgcgaaaaagtgttacgggccattgaagaattacagtatcaaccaaacaagctggcccgcgcgctgacctcttcgggttttgatgccattatggtgatttctacccgttcgaccaaaactacggcgggtaatccgtttttctctgaagttttgcatgccatcaccgccaaagctgaagaagaaggtttcgacgtgatattgcagacgtcgcacaccccggcagaagacttacaaaaatgtgaaagcaaaattaagcagaaaatgattaaaggcattattatgctaagttcgccagcggatgagtcattttttgcccaacttgataaatacgatattcctgtggtggtgattggcaaagttgaaggtcaatatgcccatgtttattctgtcgataccgataattttggtgacagcattgcgttgaccgatgcgttaattgaaagtggacatcaaaatattgcctgtctgcatgcaccgcttgatgtccatgtttcagtggatcgggtaaatggttataagcagagtctggaagatcataatattgcagtgcgtgatgaatggattgttgatggcggttatacccatgaaacagcactgcaagcagcacggcaattattaagtcagtcaccgttgcctggggcagtgtttgccactgacagcctgaaattaatgagcatttatcgtgcggcggcagagaaaaacattgctattccgcagcagttagcggtggtgggttatagcaatgaaacgctgtcatttattttaacgcctgcaccgggcggcatcgatgttccgacgcaggagttaggtcgacaaagctgtgagttattattccgcttaattgccggaaaaccgtcaccacaaaatattaccgttgccacgcatatgacgctgaaataaataccagcgaccttgcctgaatgccggatgcgatgctggcgcatcttatccggcctacatttatagatcggataaagtactcgcgccgcatccggcaatttagcccattatcagaacgagtaatttacgccgacacctgcataatggaatttatcgctgtcgccttcgtcgtgatcctgccactcaaacgcgtattccagcgaaatggaaagaccattctggaaatcataaccgtaaaataaaccaacacggttaaaatcatggccttcacgttcaatatcatcctgccagtcccagttactccagcgatccagcccaatgcgcgtatacggcgtcaccgagtggttgccgagcgtcagcggcaaataggcgcgaatttcttgcgtggaaaactcaccgttattacggctgtcgtccatattgaagccgcgctcgagataatagttcactcgcaaggcaaccgtttcgttgaaggtatattgcagacctgtttccgtttcgacacgggtatcagcgtaaccggtcgtgttcaaatcgttggcaaatttatacatcgacaaccaaccgttgaaacgtaaatcgtcagtcagtttcacatcccagtctggcgcgattttccagcgctgcatattcgccgtgtctttacccggttcatcaacgtagtgataaccataattacggaaaccgccggtcaggccgaaactgaaatcatcgctttcgaggaactgataatgtacctccagctccgggcgatcaaaccacgttccacgtttacccgcgctataatctaccggcccttcctgataataggccagagaaattctccacggcccgttggcggcattaaaatagacagaaggctccgccagcccatccatatcttcgccataacactcgacgttttctatttcgtacatcgcgccgatattaaagtgccagtcgttcttttcctcggcctgtgcgcaggccattcccgcacacatcaccagtgcggtacagggtaataactttttcattattgttccttgtattatcctgggggaatgccttccccctgtatttagcgaattgctatttccgtttctgcatcaaagaaatgacatttagtcatatcaaaatgaatagtgatattttctcctgcatgataatcatttaacgcaccagcacggaccactaactcgtgccccccaaccgtggtgtagagcataaattccgcaccggttaattctaccacgctaattttggcggaaatattattttcctcttgcgcgtccggatgaatatcttccgggcgcattcccatcacgatgggcttatgcaaactttcctgtgttttcagaaccgctaatttctcttcgggaatggttaatttaagcgtttccgtaacgaatttatcgccatcgatcgtgccgcgaataaaattcatcgctggtgatccaataaatccggcaacaaacatattcgcgggttggttataaacggttttcggcgcacccacttgctgaacaatcccgtctttcataatcacaatccgcgtcgccatggtcatcgcttcggtctgatcgtgggtcacgtagatcatggtggtgttcagtttctgatgcagcttgctgatctctgcgcgcatttgtacgcgcagcttggcatcaaggttagagagcggttcatccattaaaaacacgcccgcttcgcgcacaatcgcccgcccgagcgccacacgctggcgttgcccgccggaaagcgcgcccggcttgcgcttcaggtactcacgcaggccgagaatttgcgccgcccagttcacccgctcatcaatcacctctttggcgattttttgcatcttcaggccaaacgccatgttgtcgtaaaccgtcatatgcggatacaacgcgtagttctggaacaccattgcgatattgcgtgctttggctggaacgtcattcattcgtttgccgtcgatcaacagatcgccgccgctgatctcctcaagcccggcaatcatgcgcagggtggtcgatttaccgcagcccgacgggccgacaaatacgatgaactctttatcggcaatttccaggttgaagtccttcaccacatgcacctggttatcgtagattttttgaatatgttgtaacgaaagctgagccatgttgattcctttgctatacgttttgccagaaggccgataaccgcggccaggtcagggagtccgttgagggcaacaataattgcgccccggttaagcctgcgccgatccccaccgagcgcataccgctggcgttaatggcgtcaatgcccgcctgcgcatcttcaatgccgatacatgcctgcggcggcacgcccagcccggcacaggcagcgagaaagatttccggatccggtttcgagtttttaagttgggaagcatccgcgcagaaggtgaaaaactcgcgcagctccagcgccgctaanatcgtcggcgcattcagggagacagaagccagccctaccgggatctgctgtgcgcggagctctgccagcaaattgcgaataccgggcagcacagcattaaccgtcagctcgcgcagtgagtggacgtaaagcagatttttgcgatacgccagttgcgtccgctcctgcgggttaaagtcgccctctttgcccccgtgttgcagaatgcgccgcagagactcatcgcggctgatcccttttagggattcgttaaactgcgcatcaatgctgatgccaatttcagcggcaatctgctgccacgcctggaaatgcagatgcgcggtatcggtgattacaccatccagatcgaaaattaccccttgcagtttcattcatcctcctgatgcgtggtagcggtcccattgaagggcaaaataaaatcacccaaacagaaaacagattcttcagccacggatataagctgcccgttcaaacgcagtgaaacgggcgcagaagttcgaatcgcaatacgctgcgcgtcgagcgtgacctgtaattcgcagccctgccagaacagagggaaagacaactgttgccactgctccggtaacgccggattgagatgtaattcaccgtcacgcacgctcaccccggcaaaaccctgaatcgcccccagccagatagcgccagttgcggcagcgtggataccatcatcacaactatgcggatcagcaccaagatcgatttcagtcccctcgcgccagaactgataactttgggtcagcaggccacagcgtgcggcaacaatgccgtggattgctttacttaatgacgagtcgtgaatagtgcgcggttcataaaattgcagattggcaagacacgataccgctgagaactgctccggcagcatgtaattgagcatcaccacatcagcttgtttgaggatctgcatctcgttcacttctgcgcgtgaataatccagcagaatggtttgcttccccgccgccgctttgtatttagccagattaatcgccggcttagccataaacgaatcatcctgcggcaaaacgccatcgggctgcgtttctggcatccatagctctttgaggaacatttcggcgcgatggataaacgcatcgtcgctacagccgaactggcgggcaatattcagcgcctgttgaacgttgtagcgggccatatagctggtgaaggcgttattattgacatgttcggtatattcgtctggcccaataacatcatgaatttccagacggtcgttaaccctcaccgcgcggctaatccagaactttgcagtttccagaagtagcgccatgccttcatgagcaatgaaactttcatcccccgtggtctgccagtattgaataaccgcccaggcgatatcggccaccagatgatgttccgcctgcgccgaggccactttttgccgcagcccggtacgaatgttaatggcggcaaattctggcgtctcttcttcgccgctncgcnnnntttcccacggaaatagcgcgccctgccagccgctgcgccgtgctttctcctgcgcgcctggcaagttgtgccagcgataacgcagtaaacttcgggcaaccgtcggatcgctaaacagatggaacggcagcaaaaatacttctgtatcccagaaaacgtggcctttgtagccttcgccggttaagccttttgccgcaatactgctgcgctcgtcgtgagccggcgtcatgatgcgcagatgataaagcgcataatctaacgcttgctgatcgtgcgcatcgccgccatttaccgtgatacgacgtttctgccaccattgacgccagttttctgttgatgctgcaagaagttggtcgtaactctgctgcgcgcatatttcaagctggcgaagcgacgcgctgccccactcgtctaaaacggcttgcctgtcatcccgccagtcgatccacaccagtttttgcaacgtcactgtctcgcctgcatgaagctgcgcactggtatgttgcagcaaacggcgctctttggcggtatagcattgctgcacatcaccgctcaccttacagcaacagctgatggccacatcactgcgtccatcctgggtggtgtagatcccctgcatcagatgctgaccaaacacccgcacctgggtttcgtcgagatgttggcgaccgtggttggtttgcgtggcgtcgatacctgttgaaatcagcactgacgcgtcggcgtccagtggcgtaatagtgatttccagcgcaatgagcggcagttggtctgccgaaacaaagcgacggctggcgatggtgtaacctgcgccgttgctggtacgccagacaacgttgcggcgtaattcgccactggcaaagtcaagctcacgctgccaggcttcgtgggataacgagaaaacctcaccatttatggcaatctccatccccaagatatcaggcaggttcaccagttcgttgatttcaccttttcccgcccgatgatacagccccgccagatacatccctcgcgtctggcgcgtgtaatcttcttcatggctggcgcgaagcccaagatagccgttcccctgcgccatcagcgatgcatacttgttcagggtatgctggctgaaatggggttctgataacgttactggcctggtcataattccacacgcgtccctgtttctgcggattgatataacgccgccaccagttgctggatgatgtacccctgctcggcgtcggctatcatcacgggcttgccctgtacgtgattgataaaggcttccatgctgcccaaatggcggttgtcgtctgccatttcccgttgcatcagcgtcattaattcaccgttgttatcggtgtagatatgtgctggaaacagcgtcgcaccggctttatcaccacaaaagctgacgttcataatcgactgttcgcggatgttgagcgcaaatgacgtttccagccacagaatgccgccgttatgaaattcaatggtgccaaacagcgaatcttcgacgctgtaagttgccggatcccactcgccaaattgaccacagctcttttgcgtgccgatcttttgaaagctatgcgcattcacgcttttcaccgcaggatagcccagcacatacatcgcagcatccagcatatgaatgccgatgtcgatcagcgggccaccaccctgcagttctttattggtaaagacaccccagccgggaacnccgcagcgacgcagggcgcgggcggtggtaacgtaaatctctcccaaaacgccgttggtcacctgttcacgcagctgttgcgtatcgagcgcaaaacgatggtgaaagtcgtaggccagcaccttgccctgtttgcgcgcggtatcgcacatttcccgcgcctgttctggcgtcatggcgggcggtttttcgcacatcacatggcagcccgcttccagcgccatcagggtatgttcgtaatgaaaacggttaggtgagcagacgctaaccacatcaggtttcaccgccagcagcatggcctgcggatcgtcccacacggatgcattcccgtatttttctgccagcgcctgcgcctgggaaaggcggctgtcacagacagccaccagttccagatcgttgcgggtgcagtagtacgaagcatgaaccttatccgccacctggcctgcgcctattatcgcgacccgcagtggagagcttgtcattgcacttttcacaaagacctcttagcaggtacgcaaccaggtcaacgaatcacggtacgcctgggcaggatcttctgcccggatacgcccttcatacaccacataaccctgatagttatcggcgcgcagctgttcaaacagcgcgtggaaatcgagggtgccgctgcccggctggtaacgatggttatcggcaatatgcacatgaccgagcaagtcgcggttgtcatgcagcgcctgcgccaggttatcttcttcgatgttcatgtgatagaaatcgccgataatctgcacatgtttaagattgttttcgacgatgtaacgacgagcatcggcgagggtgttgatcatatgatcctgatagcggtttaacggttcgagatacaccacggttccggtacgcgcggcgacctgttccagtacgcgcagggaatcactcaccattttgcggtcgccgtccaggctacgcggcgaggtcatcggcggtaagcggaaggtaaacatgccccacgctgccggaacgacgatacctttaccccccacttctgccagcgcttcgagaatgcgttcgatctgctttaagccattaagacgacgctcttcgataaagtcaccaatccagccgtcatagccgccgcaggcggtggtcaccggtaaaccggtttctttgatcgccgctttgacttcttcgatgttgttgaccagcagtttgccgtcaatctcaaaaccatcgaagcccatctctttgatataacgaaatttctccagaatattttccgggaagaacgcctgattctgtgtgcctattttcattttttcattcctttgaattaaaacgtgacgcccattttgatgctctgttccggatgctgatcgacatactgcatgtagctttccgggctgttggcaaaggtcactaccgggtcgattaaatcttcgcaattgagataaccgttcatcagcagtttccagcaggtttnttcaatacgcttacggctccagcgcggataatccgggttcggttcactgcacgcgcgagagaagacaattttggcgttattgaaatgcgcttcgcgtccgaggttaaaaccttcagcaaacggtttagcaaacgcgacataggagatggtgccaccgtaagccaggccgcgcagcgccgactgcagcgcgtcggcgtaaccgctggtttcgataatcacatcggcaccctgcttgccggtcagcgttttgatctctttgcctacgtcagtgccaatgggattaaggcagaaatccgcaccgtgacgacgagcaatatcacaacgatgggcaataggatcgacgccaattaccaccgacgcgccagcgcgtttagccagttggatggcaatttgaccgatcgcgccaagccctaccaccactacaaaatcccctacgcgtacgttggcatcgcgaacgccactcatggcaaactgcgccgggtcgtagcagacagcgtttttccaggagctgccttccggcattttgcgcagcttgtagttattcactgcgttaatgatgatcgtctcggagagcgggccgtagccgcatacgctgtcgcccaccgcgtagtcggtaacgtcgctgccgcactcgataatgtcgccaaccaccatgttgccaagctggaatttgccaaactcaatgccgcgcggcgcatctgccggacgcggggtgaacatctgccattcgccgttaaagtcttcatcgataaacgggctggcggcgcggaagtcgaccacttccgttccgtgtttcggtgcgccgaaacgcacgcggatcttcacttcattggctaaaatcgcccgatcttcatactcaaccagcgcagcaacgcgcggtgctgtggctactaactttttcatgtaaaactccttgtaaagaaactggccgctttagcccttcacgccaccggcggtcaaaccactcttaataaaacgttccgaaagcgcatacataatcaccaccggcaatgcggtcaccagcgaggccgccatcatccgtccccagatgtaatctggcgtactgaacagcgcgttcaggccgactggtaaggtgaaattgctggcgctggagaggaaaatcgacgcaaacagatagtcgttccatgccaccataaagcagtagacgaatacggatatcagcccggacatcgccaggggcacggtgatacggaagataatttgcagacggttgaggccatccatcatcgccgcttcttcgatctcatcagggatggtgtcgaagtaacttttcagcataaacacggcggtgggcagagtttgcgtcaccatggtaatgatcagcgccatctcggtgtcgtaaatgccaagtgcggtgataattttgaacagcggcaccaccagcaaaatgccggagaacatatacaccgtgtaaaagctggcgttgatggtcatccggccttnnnnncgcaggcgagaaagcgcgtaagctccgagaatgccgagaaataccgccaccacggatgaaaccaccgacaccaccatgctgttacggaagtagtcgacaaacgggaaaatcaccgggttaaaaatgtcgacataatgctccagcgtccactgttgcggcagcagcgtaggatgcagcgagatcgcctcttttgcgctcttgaacgaggtcatcagcatcacaaaaaacggaaacagcgtgatgatgagaaacagcgccagcccgcagtaaaaaccgatacgactgagtgtgcgtttatttgttgccattgaggttcacccgtttcctggtcagcagaatgacagcgaaaataatgatgaagagcaccaccgagatcgccgccgctttccctaagtcattaaaggcaaaggcggttttgtagagatagacaccaagaatatcgaccttggttgtcagcagataaacatccgcgaacatgtagaacatccagatggtgcgaagggtcaccaccgtcgccaggaccggcataatcgcgggcagcgtgacgatacgaaaccgttgccaggcattagcgccatccatctctgccgcttcgtacagcgatttgtcgatggtctgcaaaatcgccagaaacgagataaaggcatacgggaagtagcgccagatggcgaagatcaccaccagcacaaaactactgcccggattatcgaaccacagcggtgcctgctcataaagatgcagaagatcgacgccgaggtagttcacaatgccgtagccgttgttgaacatgtatttccaggcgaacaccagcgaaatagacggcgttacgtaggagaggatcaccagcgaaagcgcggttttgcgcaggcggaactcgcggttgaaaaacatcgccactgccagcccgagcacggtgctgcccgccaccaccaacgcggtataccagaccgtcatccacagcgagtgccagaagccgggatcggagagaatacgcacatagttgcttaccccaacaaacgttgactcgatgttgggattgagcggcagacgtaaaaaactaatttcgatattcgacaccattggccacgcaaccagaccgcccagcagtaataagctgggtgcgagaagcaacagcgcaaagggcatatcggaacgacctgaaaaaagcctgttcattgcggattcctgtcctgggtttagtgctgttcgatcagttcatccagctttttctggctcgtttgcagcgtgccagggagatcggctttacctacggtgacgttatgcaccatggagctcaccaccccagaccccgtcacatcgcccatgcgggtaaagtttttatcccctactgcgccaaagacctgaatattcggcagttcaccgattaactgatttggcagttcacccagcgccttaataacgtcgttgtctttccaggtggaagtagtgacaaccgctttgttcaccggcagcgccncgcctggcgacatcatcacccagtcggcaatgttgtctgcctgctccataaaggtgacaaatttttcagccgcttccgtttcttcagtcttttgtccggcggtaatggtcagcgaggtcaacatgccgtagacggcagagtttttctcggttggcaccacgaaaccgacgtttttcggatcgccttctttaatcacagccggaaggatataggtggagtaaatcgccatcggcgcggtgccgttcataaaggcgtctttcacttccatgatgtcgttagaacccggcatggtgttggcagcaaggtcgcggtaataggtcagcgcctgcatcatctctggtgaatcaagggtgattttgccttcggcgttaaagacgttggcctggttggataacgcaaactgggagaaggattgttccgtcagcacgctttctgccgtaggcagcgcaataccgtattttttattcgccgggtcattcagtttctgtgcaacgtccagcagctgttgccagtttttcggctcctccagccccgcttttgccagcacatctttgcgataccagatgccgccaatccaggcgctgacaggaacaccggtccatgcgctaccatcttcggtacgcacaatacgcagtacgccatcgtaaaacgcgccttcaccaacgttgctgatgaccgtggcaaccgccttgcgatcgataagctgctctttgtccataactttggcgtagtcatgactggtttcaatcacttccggcagcgagccgctacgtgaaagagtgatgactttggtgttataagcgtcctcttcgacgggcacttgtttaacggtgatacctgggttttctttttcaaaacgggcaatcaatttgctgataactgcctgacgctcctgctccaccgaagaatgcataaattcgatggatacatgggttttattttcttctttacagcctgaaatcagggcgcaggaaaccagtgctgataacagcacgatttttgatttaatcatgagatgttcctttttatttaatccacataacctgccaggggcgcagcgttattttattacccaatatatcaacttcactaatcagatcccgaccgtgcaggccagtaatatttacatgctgaatatttttactgacattaaacaatccggtcagacaattaccctctgcgttacttctttgaatacgcattacggatgaattaaccgtatcgatggtaaaattattatccggatgaaactcgttatggctgcgacgaagtgtaattaaacgcgacaactcatgatataccgcatgccttaatgtagcttcatcgttcagttctcgggttatctcttcactgtgatattttttacggttaatcgcacggttatatccgagtttttcgacacctgcgtaatcattacgcgagcccagaatactttgaatatatatcgctggcacaccggggaaacttaacaaaatcgcatgggcaaggataaacctggcgcaacgttcttcatcgctactctcgcggcggcttaacgcatccatataggtgacatttatttcatagggactgcgcgtaccgtcgggattatttttccagtttactaatgcaccttcctgctgtaatgcctcgaccagcgctaatatttcgctttctggtaacaagccccgcagtgggttcagcccgatgccatcgtgagaggcgaggaagttaaaccaggtcgttttaccggagggcaagctcagactttgcgcccactggcacagcgcctcgacgttctgtttttgcaccgcatgtaacaccagcggcggcagcgagaactggtacaccatatgcgcttcgtcatcgccttcgccaaagtaagcaatgttatctttatgcggaacattcgtctcagtaataatcaccgtacctggcgcgatgtcatcaataatcgaccgtaacagtttgataatcagatgtgttttttccagatggatgcagcttgttcccggctctttccacataaagccaacggcatccagacggacatattctgcncccttttccaggtaacaaagcaaaacatccaccatcgccagcaacacgtcagggctacggtaattcaggtcaatttgatcgtcgctaaaggtggtccataaatggcgcgtggaattatcatccatttgaaacggcgttaatagcggtaatgcacgcggacgggtgacagcgctgagatcggtttgcggatcaaccgcaataaaaaaatcttcaaaacctggctgctgttgtaaatagtttttaaaccattcactttttgccgacatatggttgcagacaaaatcaaacattaaatgactgcattcaccgagctgctgaatatcctgccactacccgcttcactggcgacctgatgataatcaattaccgaaaatccatcatcagatgaccatggataaaaaggtaataaatgaacatgtgaaaaaatgctttgcagccattgatggtaaaactgattaaatgtgggtagtggttttaaatcattactgtgaaattgatcggcataggtaattaacacgacatcactttcatcccagtgttttttacgtcgctgtgtaattaatcgtttcgcactctcaagacgcgttacaagtttctgtaaatgagttgcggtaaatgttccaccgtagatttcgtccaggtaatccgtaattttctgtttcatgttgcctttcctggtagcggtcccatgaaatgagagactactccgcagaaaataaactgtcaattgagcacaagggttttagtcacgcaggaaatcattttttaccagnnnnnaaagcgtatttgtgagctgacgcaaataatctatagggatgtaaataaggtgtgacagaaaaaaacggcgcataagcgccgctcatggtgaattcttttaacctttgaccttcggcattgcgatgtctttcaggccaccggcgttctcaacgtgggtatatcccatctcgctaaggatctcttttgcctgccctgattggcgtccggcattgcaatacactttcacggtgtcgtttttatccggaacgacggtggcaatgcgctctttcacttccttcaggggaatattgatggccccctgaacgtgctcttgctgatactgctctggaacacgaacatcgatccagtgttcagcggcgaaaacgggcagtgaaaacaccagtgccagagcaagtaagccttttttaaacatgtaagcgtccttctatggatgaatattgctatccattatacgcctgagatttaacaatttttgcgaaactcccctcaccttttataacgctgcgccagtttattggcagcccgacttaacagcggttccagcgccacagccagcaacattttcagcggtcggcgagcaactgattttatcgcccagcccgccacacccgctgggccatagcgcagtgcggtaagaagtaccagcttgcctgctaatttgaaaccaagctttaccttttgcccggcctgttgccagcgagtattcataactttcctcacagttgacggaaacggctacgtaacgtgaatgtatcggaagtgacataacgttccatctcgcgtaaacgcgtttcacttgccgccagttcacggtcgacttcatccagcaattcactgctggaaggtagctgctcaccaaaggccatgttgtccggcattggatcaagcgcaaatgacaaaatgatgtaagcaaccagggtaaacagcgccagaccgaagaaaatcgacaacaccaccaggatacgcaccagttttaccggtacatcaaaatagttggcaatcccggcgcagacgccacggaccatgccctgctgtggaatacgccataattttttnttgagattaatgcccgccattagcgatccctccagttcggatgttctgcatcaagaatagattccagcgcctgaatacgttcgcgcatccgttttgcttcatcagccagttgcgctaatcgctgctgctcactttgcgacaattcactgcgaccagaacgattgctgtaatgcagccataaccagatcggtaaaacaaacagcacaaaaatggttaatggaatagccagaaatagcgcgctcataagtactccttagacgatgagcggcggcgcgttcggacgccgcctggatgttattattgattgtcttgcttcattttggcttttaattgtgccagttgctcgctgattgcatcatcggctttcagttcggcaaactgatcgtccagcgatttttgtttaccgaagctgtggctttctgcttccgcttccatctggtcaatacgacgttcgaaagattcgaaacgagccattgcttcatccagtttgccactgtccagctgacgacgcacatcgcgcgacgagtttgccgcctgatggcgtaacatcaatgcctgctggcgagcgcgtgtttcgctcaatttgttttccagctcgccaatctctttcttcatgcgtgccagcgtatcgtccaccagcgtcacttcatgttccagggacttaatcagatcggtcagtttctgtttttcaattaacgccgcacgcgccaaatcctctctctctttcagcagcgccagttcggctttttcctgccattcaacttcacgcgccgacgcttgttcaatacggcgagtcagctgtttcttttctgccagcgcacgcgccgaagtagaacgtacttcaaccaatgtatcttccatctcctggatcatcagacgcaccagtttctgtggatcttccgctttctctaacagagcgttgatgttggcattcacgatgtcggcaaagcgagaaaaaatacccataatgttgtcctcttgatttctgcattcaggattgtcctgctgaactgttaatacaatttgcgtgccaattttttntctttttgatttataaagatctgattgaagaatcaacagcaacatgccaggatgaattagctaattacactaacaagtggcgaatttcatcatggcagaatacaaagataatttactcggtgaggcgaacagctttctcgaagtgctggaacaggtttcgcatctcgcaccgctggacaaaccggtgctcatcatcggcgaacgcggcaccggtaaagagctgatcgccagccgcctgcattatctctcctcccgttggcaagggccgtttatttcccttaactgcgcggcgttaaatgaaaatctgctggattccgaactgtttggtcacgaagcgggggcgtttaccggtgcgcaaaaacgtcatccagggagatttgaacgtgccgatggcggtacgctatttcttgatgaactcgctacggcaccgatgatggtgcaggagaaattattgcgcgtgattgagtacggtgaactggagcgcgttggcggcagccagccgttgcaggtgaatgtgcggttggtatgcgcgacgaatgccgatctcccggcgatggtcaatgaaggtacttttcgcgctgacctgctcgaccggctggctttcgatgtagtgcaactgccgccactacgcgaacgtgaaagcgacattatgttaatggcggaacactttgccatccagatgtgtcgggaaatcaagctgcctctgttcccggggtttacggagcgcgccagagaaacattgctgaattatcgttggccaggaaatattcgtgaattgaaaaacgtggtggaacgttcagtgtatcgccacggcaccagcgattatccgcttgatgacatcattattgatccctttaaacggcgtccgcctgaagacgctatcgccgtttcagaaaccacctcgcttccaacactgccgctggatttacgtgagtttcagatgcagcaggaaaaagagttgctgcaactcagtttgcaacaagggaaatataaccagaagcgcgcagctgaattgctgggcttaacctatcatcagttccgcgcgttgttgaaaaagcaccagatttagcgaagttgggcaatacaacttgccggatgcggcgtgaacgccttatccggcatacataatcaatacgtcgtttgcaggtctgataagcgcagcatatcaggcattattgcgttgcccctgcttctgcgtattaatctctcagcgcatcctgcaaaattttcattgccgcatcgaattgcgcatccgggatggtcagcggatacaggaaacgaatcacgttgccgtatgcgccacaggtcagtagaagcagtccctgcgccagcgcgcgttgctgaattttttgcgcaatggcggctgacggctcgcccgtttgcgngtcgttaaattctgccgcaatcatcgagcccagaccacgtaccgccgcgatggccggaacgttttctttggcatcaatcagggttttcgtcagacgctgccccaactgcatggcgcgctcacagagtgactctttgtcgataatgttgagcaccgcgtgcgcggcagccaccgccagcggattcccggcgtaggtgccgccaagcccgcccggcgcgggcgcgtccataatattcgcgttaccgaccacacccgaaagcggcatcccgcccgcgaggcttttcgccatcgtcattaagtccggcttatcggcgtaatgatccatcgcaaacagtttgccggtacgcgcaaagccgctttgcacttcatcggcaatcatcacaataccgtgctcgtcgcacaggcggcgaatggcggcaaccagctcttttggcgcaacgttgaaaccgccctcgccctgcaccggttcgaaaataatggccgcgacctgcttcgcttcgatgtctgatttaaacaagcgttcgatggcgtcgagggagtcctgtgttgaaatgccgtgtaaatctgacggataaggtacgtgatacaccgaaccagggaacgggccgaagccgattttgtacggcgcgacctttccagttaacgccatagtcatatacgtacgaccgtggaagccgccgctaaacgcaatcacgccagggcgtccggtatgggcgcgggcgattttcaccgcgttttccaccgcttccgcaccggtggtgaagaacgcggttttggcctgcccgctcaccggggcaagggcgttgattttctccgccagggtgacgtagctttcatatggcacaatctgatacgcggtgtgggtaaactgttgcagctgctgctccaccgccgcgaccagatcagggtggcgatgtccggtattcagcaccgcaatgcctgcggcgaaatcgatgtactcgttgccctcaacatccttcagcgtggcgttttcagccgactgggcgaagaagttacacatcacgccaaccccgcgcggggtggcagaaagacgacgctgatggaattcattgttgctcatgtttcacaccttttgactnttcactgttaatcggaaattaaacgcccagacgatcgcgcaggctgtaatacgccgcgcccatcgcggtaaacggtacgcgcagcgtgcgcccgccggggaacgggtaatgcggcagattggcgaaggcatcgaaacgttcggcgtcgccgcgcagcagttcggcaatcaaacgtccggcgagatgagtacaggtgacgccgtggccgctgtaaccctgcatgtaatagatgttggtatcgaggcgaccgaactgcggcatacgcgacagggtcagcaggaagttgcccgtccagcgatagtcgattttcacgcccttcaactgcgggaaggttttcagcagtttcggcaccacaagacgctcaacgtcatccgggtcgcgcgcgccgtacaccacgnnnncgccgtacagcaaacggttgtcggcggtaagacggtagtaatcaagcagataattacagtcttccacgcagtagtttttcgggatcagcgaacgggctaaatcatcggaaagccgctcggtggtgatcacctgcgtaccgcacggcatgctgcgtttcgccagttccggctccactttatcgcccaggtacgcattcccggcgacaatcacatacttcgccgtcacctgacctgtggctgtacgcactacggcgggcgtggtgtgctggatctgcgtcactgcggaaagctcatacacgcgcccgccgttcaggcggatnnnnnncgcttcgccaatggcgaggttcagcgggtgaatatgcccgccgctgtgatccagcagcgcaccagtgtagcgatcgctggcgacctcgcggcgaatggcgttggcgtccagcatctccagctgtttattgccgtagcgttcccagttctctttctgctcttcaagtgtggcgagctgtttatcattcatcgccacaaacagaccgccggggcggtagtcgcagtcaatctgataacgtttgatacgttcgcggatgatctcaccaccttcgaacatcatgctgccgagcatacgggcggtgtccatgccgtagcttttttcgataacgtcgatgtcgcggctgtaggagttcacaagctgcccgccgttgcgcccgctggcgccaaagccgatgcgtgaggcttccagaaccaccacgtcaaagcccgcttccgccagatgcagtgcggaagacagcccggtatagccgccgccaaccacgcaaacgtcgcaggaaattgactcattcagcgtgtcgaatggcgcgtatttattcgcactggcggcgtagtaactgctggtatgttctgtcatttcaggcctccaggcttatccagatggttttcagttcggtgaatttttcaagggcatgcagggatttgtcgcgaccgttgccgctctgcttatagccgccaaacggcacggtcatatcgccgtcgttgtagttattgacgaagacggaaccggctttcaggcgtcggctcatgcggtgcgcgcgggagaggtcgcgcgtccataccgccgcgccaaggccgtactggctgtcgttggcaagctgtagcgcctgttcttctgatgtgaaacgcgtgaccaccagcaccggaccgaaaatctcttcgcggcttaaggacgcattcgggtctacatccacaatgatggtcgggccgatggcgacagccagcccggcgttacggccatccaacaacagttgccctttgctttcgccttcctgaataaagctatggaccgagtcggcgtgggcgcagtcgattaaggtgcccatggtggttgcgggatcaagtggatggcccggctgccagttttgcgcctgcngttttaacagggctaagaattcatcggctatgctctcttccagcaacaggcgcgttccggcgatgcacacctgcccctggttgtagaagatgcctgctgcggtggcgcttgccgcctgttgcaaatccgggcagtcagcgaaaacgatgttggcgcttttgccgcccgcttccagccagacgcgtttcatgttgctgtcgcctgcatctttcagcagctgtttcccggtacgggtcgaaccggtaaaggcaatggcgtcgatatcgttatgacgcgacagcgcctgccccgcttcatgaccaaaacccgtcaccacgttcaacacaccatccggcaagcctgcttctttcgccagccccgcgagacgaatcgcactgagcggtgatttttcagacggtttcaggacaacgctgttccctgctgccagcgccgggccaagcttccagcaagtcagcagcagcgggaagttccacggcacgatggcggcaatcacgccgaccggttcacgcacgatcatcgccagctcatggctactggtggtcgccacttcgccatacactttgtcgatcgcttcggcgtaccagcgaatggcgcgngccgcgccgggtatatcatcacgcagactgtgacgaatcggtttgccggtgtcgagagtttccagcagtgccagctcttcggcgttggcttctattaaatcggcgagtttattcagcaccgctttacgttttgccggagaagagagtgaccagtcgccgcgttcaaatacgccgcgtgctgcgctcaccgcacggtcgatatcgacgctcttgccgcgcgcnatattcgccagcggtgcctgggtaaccggatcaacggtttcaaaggtttcattttccgccgcagcagtatattcaccgttaataaataagcggttttcaatggcgagacttaacgctttatcctgccagtaagccagatgatgaaaattcattatgactcctgtttcacgtctatcagatatatgcagtttgtgaacgtcagggngcagagatccccgggccgtatgcccgtttatttctggcgacattctttatggattgccgggcgcattgcgcttacccggcttacagaacaaaaagattaaaacgtggtgggcgtatgggcgctgataattcggcaaatacctgccgacgtattactgaaactgtgcgggatgccggtattaatggcataactttgccccgcgacgaggtggtaatcctgaccattaatcgtcagaataatttcaccttccagtacagtgcctatttcctcaccctgatgcttaattctttccccagtggttgtgcccggctggtacgtttcaaagatcatcgccagcgtgcgattcgggttaccgttatgaaccagcttcattgacacaccctgactgcccatctcaattaaatcgtcctgattaatgacgacctgcggctcatcaggtttttccggctcggaaaagaattccgagagtgacagaccatacaccttcagcagcttttgcagcgtactgatggcagggctgactttatcttgttctatcgtactgatagcactgtgagtcagcccggagagttcggcggcacgacgttgtgaaagcccctgctgctggcggatttccgacaagcgttttcctggcgccagtccctcatcactcatatttgcatttccttaaactgtagtggtcagagtcgctgtttttcagcgatatggtgctgacaagcggtgataaagccntcgaacaatatacgcgaaagcgcgtantcgctactgttccattccgggtgccactgtacgcccagcgcaaaaggatgattgatgacgctaaccgcctcaactaagccatccggcgagcgagcttcaacacgcaaccgtgggctaacgaccttcgccccttgtccatgcagagagtttacccaaaagttgctacattcaggtaacaatgcagacagcaatcccccctcttcaacctgaacttcatgcgacggtgcatattgctgttccaccggcagttcgggatcttcccgatgttccagcaattcaggctgttcgcacagcttgcgatgcaacgaaccaccggttgccaccaccagttcctgtaaaccccggcagatggcgaaaatggggatgcgcctttcgagtgcggcattaattaacgccatgctcagaagatcacgcccgggatcggcgtcaggctcatcgccgttttcaccatataggtgcggctgcacattgctgggactaccaggaaggtaaatgccatcgagtttcggcaaaagttgttcaagtaacgacggttccgccagcgcatgtggcagcgcaattggcaagccgcctgcgtggatgatggcattcaggtacttttcttgcagagtctgggtcgcatgccccttaagcctgttcctgcacattacgacaccgataaccggattgttcattatattttccangctcaatctcacaaagtggactaaattatcgccattactgcggtttaaatgacctttatgttcaatattttttcaatctagcagtgggttttcatttttgcaaactcaatttaacatttgacaaacatttagtttgcatacagattcgaatggtggtcattatattttacgctttgataacgagcggaaaacaaaccaaaggcgaagaatcatggaaaccaatatcgttgaagtagagaactttgttcagcagtcagaagagaggcggggtagcgcctttacgcaggaagtgaaacgctacctggagcgctacccgaatacgcaatatgttgatgttttacttaccgatttgaatggttgcttccgtggaaaacgtattcctgtttcaagcctgaagaagctcgagaaagggtgttatttcccggcctcggtatttgcaatggatattctgggcaacgtagtagaagaagcaggtctgggtcaggaaatgggcgagccggatcgtacctgtgttcctgttctcggttccttaaccccttctgccgccgatccagagtttatcggtcagatgctcctgaccatggtcgatgaagatggcgctccctttgacgttgagccgcggaacgttcttaaccgcctgtggcagcagctgcgccagcgcggattgttcccggtcgtagcggtagagctggagttctatttactggatcgccagcgcgacgctgaagggtatctgcaaccgccctgcgcgcccggcactgatgaccgcaatacacaaagccaggtttactccgttgataacctcaaccacttcgccgacgtgctcaatgatattgatgaactggcgcagttacagctgattccggcagatggcgcggtcgctgaggcctcgccgggtcagtttgaaatcaacctttaccatactgataacgtgctggaagcctgcgatgatgcgctggcactaaaacgcctggtgcgtctgatggcagaaaagcataagatgcacgccacttttatggcgaagccgtatgaagagcacgcgggcagcggaatgcatatccatatcagtatgcaaaataatcgtggcgagaacgtgctttctgacacagaaggcgaagattcgccgctgctgaaaaagatgctcgccgggatgattgacctgatgccgtcatcaatggcgttgctggcaccaaacgtgaactcgtatcgccgcttccagccggggatgtatgtaccgacgcaggcgtcgtggggccataataaccgtaccgtcgccctgcgtattccatgcggcgatcgtcataatcaccgcgtggaatatcgcgtggcgggtgccgatgccaacccatatctggtgatggcagcgatttttgccggtattttgcatggccttgataacgagctgccgttgcaggaagaagtcgaaggtaacgggctggaacaggaaggcttacccttcccgattcgccagagcgatgccctgggtgagtttatcgagaatgatcacctgcgccgctatttaggcgaacggttttgccatgtgtatcacgcctgtaaaaatgatgagctgttgcagtttgagcgcctcatcacagaaacagaaattgagtggatgttgaaaaacgcatagtaccccttgcggggttgtttcatcggcctgagnggagccaggcctgacatttgctggtaatccagacatttcccggatgtcgcgttatggagcgcaggcggcaacgggcttccgttaacgattaagactgtgacgaggaaatgagatgatgccgatgattaaatccccgcatggcgcgggaggctgcgtatgcgcccctcctgcgactgactggactcnnnnccctttgcttcccttgctaaacaggtttgatttcaggtcgacacgaccgcaaaccttattacgcaggggaggcagcaattatggctattaattcaccactgaatattgctgcgcaacccggcaaaacccgtctgcgaaaatcactgaaattgtggcaggttgtgatgatgggtctggcctatctcacgccgatgactgtgttcgatacctttggcattgtatctggcattagcgacggtcacgtccctgcgtcctatttgctggcgctggcgggcgtgctgtttaccgctatcagctacggcaaactggttcgccagtttccggaggccggttcggcctatacctacgcgcaaaagtcgattaacccgcacgtcggatttatggtcggctggtcatcactgctggattatctctttttgccgatgatcaacgttttgttggcgaaaatctatctctccgccctcttcccggaagtgccgccgtgggtgtgggtggtaaccttcgtcgccattttaaccaccgcgaatctgaagagcgtcaacctggtcgctaacttcaataccctgtttgtactggtgcaaatctccatcatggtggtgtttatcttcctggtggttcagggactgcataaaggagaaggcgttggcaccgtctggtcacttcagccgtttatcagcgagaacgcgcacctgatcccgattattaccggggcgacgattgtctgtttctcgttcctcggtttcgatgcggtgaccacactttcggaagagacaccagacgccgcacgcgtgatcccgaaagccatcttcctgacggcggtctatggtggcgttatctttatcgcggcgtcgttctttatgcagctgttcttccccgatatcagccgctttaaagacccggacgccgcactgcctgaaattgcactctacgtcggcggtaagctgttccagtcgattttcctctgcaccacgtttgtgaacacgttagcgtctggcctggcctcacatgccagcgtgtcacgtctgctgtatgtgatggggcgcgacaatgtgtttccggagcgcgtgtttggctatgtgcacccaaaatggcggactccggcactgaacgtcattatggtcggaattgtcgcgatgtcggcattgttctttgatttagtcaccgcgacagcattgattaacttcggtgctctggtggcgtttaccttcgtgaatctgtcggtgtttaatcatttctggcggcgtaaaggaatgaataaaagctggaaggatcacttccactatttgctgatgccgctggttggcgcgctgacggtgggtgtgctgtgggttaacctcgagtcaacgtcactgacactcggtctggtatgggcttcgttaggcggcgcatatttgtggtatttgatccgccgctatcgcaaagtgccgctgtacgaaggtgacagaacgccagtgagcgaaacgtaatagtcggatgcgcgccgcattatcctgcctgagggtaatgcgcnncgccattaactataaaaagatgtatgacccggatcacgagtgctatcatccgcccttatgcttagcgcattaaccccaggggcaaataatgaaccacgatatcccgctaaaatattttgatattgccgatgagtacgcgaccgaatgcgcagagcctgtcgcagacgctgaacgcacaccgctggcccactacttccagttactgctcacccgtttgatgaacaatgaagagatcagcgaagaagcccagcatgaaatggctgctgaagcggggattaatcccgtacgcattgatgagatcgcagagtttttgaatcaatggggtaatgagtaattntttaattgcagacgatcggtcagtatcgttgtccggataaagcnttcacgccgcatccggctaacaatgacacgcactgcagcgtgctttaatgggtttctcacgatcgtaccgctctgctcctcgctaagttgttctgtgagttatagttatagagaaatcacgggtacgaatgttgaacagatggcgacgccnnnnnnnnnnnnnaccaaccacacggccctcattacgacccctgaacacaaacggtaatggcaaatgtcattaaatattagtaagatagcctctttacataaaatcccttaatattatgcgccaggtattatcgtctcttttggtgattgctggacttgtgagtggtcaggcaatcgccgcgcctgaatcccccccgcatgctgatatccgcgacagcggttttgtctattgcgtcagcgggcaagtcaacacctttaacccatccaaagcgagcagtgggttaattgtcgatacccttgccgcccagttttatgatcgactgctggatgtcgatccctatacctatcgcctgatgccagaacttgccgaaagctgggaagtactcgacaacggcgcgacctatcgcttccacctgcgtcgcgatgtcccgtttcaaaaaaccgcctggtttactcccactcgcaaaatgaatgccgacgatgtggtgtttaccttccagcgaatttttgaccgcaacaacccgtggcataacgtcaacggcagcaacttcccctacttcgacagcctgcaatttgccgataacgtgaaaagcgtccgtaaactggataatcataccgttgagttcagtctggctcagccggatgcttcttttttgtggcacctcgcaacccattatgcttcggtcatgtcggcagaatatgcccggaagttagagaaagaagatcgccaggagcaactcgaccgtcaaccggtcggcactggaccgtatcagttgtcggaataccgcgccgggcaatttattcgcctacaacgtcatgatgacttctggcgcggtaaaccgttaatgccgcaggtggtggtggatttaggctccggcggcaccggacgtctgtcgaaactcctgaccggggaatgcgacgttctggcctggcctgctgccagccagctatccattttgcgtgacgacccgcgcttgcgtttaacgctgcgtcctgggatgaacgtcgcctatctggcatttaacaccgccaaaccgccgctaaataatcccgctgtccgccatgcgctggcactggcgattaataaccagcgcctgatgcaatccatctattatggtacggctgaaacggcggcctctattttaccgcgcgcctcgtgggcctatgacaacgaggctaaaattactgaatacaatccggcgaaatcgcgcgaacagttgaagtcgttggggctggaaaatttaacgctgaaactgtgggtgcccacacgttcgcaggcgtggaaccccagtccactgaaaactgccgaactgattcaggcggatatggcgcaggttggcgtaaaagtggtgattgtgccggtagaaggtcgctttcaggaggcgcggttgatggatatgagccatgatctgacgttatccggttgggcgacggacagtaacgacccggacagtttcttccgtccgttactgagctgcgcggcaattcattcacagaccaacctcgcccactggtgcgatccgaaattcgacagcgtgttgcgtaagacgctctcctcgcagcagctggcggcgcgtattgaagcctatgacgaagcgcagagtattctggcgcaggaattgcccattttgccgctggcgtcgtcattgcgtttgcaggcctatcggtacgatatcaaaggtctggtacttagcccgtttggtaacgcctcctttgctggggtgtatcgcgagaaacaggatgaggtgaaaaaaccatgattatcttcaccttacgccgcattttgttattgattgtcaccttgttcctgctgaccttcgttggcttcagcttgagctatttcactccacacgcgccgttacaaggcgcgtcactgtggaatgcctgggtgttctggtttaacggcctgatccactgggattttggtgtttccagcattaacggtcaaccaattgccgaacagttaaaagaggtcttcccggcgacgatggaactgtgcatcctcgccttcggttttgcgctgattgttggcatccccgtggggatgattgccgggattacgcgccataagtggcaggataacttgatcaacgccatcgccttactgggcttttcaatcccggtgttctggctggcgcttctgttgacactgttttgttcactcacgctaggttggttgcccgtttcagggcgtttcgatctgctctacgaagtgaaaccgattaccggttttgcgttgattgatgcctggctttcggactcaccatggcgggatgaaatgatcatgagcgcaatccgccatatgatantgcccgtgatcaccctgtcggttgcgccaacaactgaagtgatccgcctgatgcgtatcagcactatcgaagtgtatgaccagaactatgtaaaagcggcggcgacccgcggtttgtcgcgctttactattttgcgtcgccacgttctgcataacgcgttaccgccggttattcctcgcctgggcttacagttttccaccatgctgacgctggcgatgatcaccgaaatggtttttagctggccgggtttagggcgctggttaattaacgccatccgccagcaggattacgcagccatttccgccggagtgatggtgtgtggctcactggtcattattgttaacgtgatttctgatattttgggtgccatggctaaccctctgaaacataaggaatggtatgccttacgatagcgtatacagcgaaaagcgcccgccgggcacgctgcgtaccgcctggcnnnnnnnnnnnnnnnacgcctctgcgatggtcggcctgtacggctgcgcggggctggctgtactgtgtatgtttggcggctggtttgcgccttacggcatcgaccagcaatttctcggttaccaattattgccgccatcatggtcgcgctatggcgaagtttctttcttcctggggactgacgacctcggacgcgatgttttaagccgtttactgagcggagctgcgccaaccgtgggtggcgcatttgtggtgacacttgccgcgacgatctgtggcctggtactgggcaccttcgccggggcgacgcacggcctccgctcagcggtgcttaaccatattctggataccttactggcgatcccttccctgctgttggcaattatcgttgtagcgtttgccggaccgagtttgtcccacgctatgtttgctgtctggctggcgctgctgccgcgtatggtacgttcgatttacagcatggtgcatgacgaactggaaaaagagtacgttatcgccgcccgtctggatggcgcatcaacgctgaatattctctggtttgctgtgatgcctaacatcaccgccgggctggtcaccgagatcacccgcgcactgtcgatggcaattctcgatatcgccgcgctgggctttctcgatcttggcgcacaactcccctcgcctgaatggggatcgatgctcggtgatgcgctggaactgatttatgtcgccccgtggactgtcatgctgccaggtgcggcaattatgattagcgtgctgttggttaacctccttggcgacggtgtccgtcgtgcaattattgcgggggtggaataatgccattactcgatattcgtaacctgactattgaatttaaaaccggtgatgagtgggttaaagccgttgaccgggtaagtatgaccttaaccgaaggtgaaatccgcggtcttgttggtgaatccggttccggcaaaagtttgattgcgaaagcgatttgtggggtgaataaagataactggcgtgttactgcagaccgtatgcgttttgatgatatcgatttgctgcgtctctccgcacgcgaacggcgcaaactggttggccacaacgtgtcgatgattttccaggaaccgcagtcgtgtctagatccttcagaacgtgtgggtcgccagttgatgcaaaacatcccagcctggacctataaaggccgttggtggcagcgttttggctggcgcaaacgccgtgccattgaactgctgcaccgcgtgggaattaaagatcataaagatgcgatgcgcagttttccctatgagttgaccgaaggtgaatgtcagaaagtgatgatagccattgcactggcgaatcaaccgcgtctgctgattgctgacgaaccgacaaactcaatggagccaacaacccaggcgcaaatctttcgcctgctgacgcgtctaaaccaaaacagcaataccactattttgcttatcagccatgacttacaaatgcttagccaatgggcggataaaattaacgtgctttactgcggtcaaacggtggaaaccgcgccgagtaaggagttagtgacgatgccacatcatccttatacccaggcgctgatccgcgcgataccagacttcggaagcgcgatgccgcataaaagtcgcctcaatacgctacccggcgctatcccactgcttgaacagttaccgattggttgtcgtctggggccacgttgcccgtatgcacaacgagaatgcattgtgacgccacgtttgacgggggngaaaaatcatctctatgcctgtcatttcccgctgaacatggagaaagagtgagatgatcgaaacgctgcttgaagtgcgtaatttaagtaaaacgttccgctaccggaccggttggtttcgtcgtcagaccgtagaagcggtaaaacccttgagctttacgctacgtgaaggccagacactggcgattattggcgagaatggttcgggtaaatccacgctggcaaaaatgctggcgggaatgatagaacctaccagcggcgagttattgattgacgatcatccactgcattttggcgattattccttccgcagtcagcgtattcgcatgatttttcaggatccttcgacctcgttgaatccccgtcaacgtatctcgcaaattctggattttccactgcgcctgaacaccaacctggaaccggaacagcgtcgcaaacagattattgaaacgatgcgtatggttgggctgctaccggatcacgtcagttactatccgcatatgttggcccccgggcaaaaacagcgtctgggtctggcgcgcgcgctgatattgcgcccaaaagtcattattgccgatgaagccctcgcttcactggatatgtcgatgcgttcgcagttgattaatctgatgctggaattacaggaaaaacagggcatttcgtatatttatgttacccagcatatcggaatgatgaagcacattagcgaccaggtgctggtgatgcatcagggcgaggttgtcgagcgaggcagcaccgcggatgtgctggcatcgccgctgcatgaactcaccaaacggctgattgccgggcactttggcgaagcattgacggcggatgcgtggcgtaaggaccgttagtgttctgcacctcatcctgacaggggaaaccccctcaggatgaggtattcattacttttgattgtcgattctggtgagagcaaccaggaatgccagtgtataacacaccgtaattgccagactcatttttaacagtgtttctccgccaaatcccgacaatggcgcggctataccgccgaagacaaacatgctcatccccatcaacgcagacgccgttccagattcctgcgtccctactgcactcatagcctctgccccgccaacagtgccgatgccgctacaaaatgcaatagtgaaaaataatgccaccagtgccggaatgggcaattgtgtccatgcgcataagaccgtgagcaatgcacacaaaattgccgctatcaggccacctcgcaacaatgtcatcgcattaatccgtcgcgccagacgcgaaaagatccatgaagcaatgataagtccgatgccgttaaggccaaacaccaggctaaattgcattggactaaagccaaattccttctgcaacacgaacgacgaagagccgatatacgcaaacaagcctgccagcnataaaactttgaatcaggcaaaagcgcataaaacggcggttctgcaccacgcttcgtccggttaatagcaatgatgagccccttttattttctggcaaggtctcattaataaataacacgcagcccagcaacaatacggtgctaatttcagccattacccagaataaagtgcgccagtcaaaagtgctaacaatgtacccgcccagcactggcgacaacaccggtgccaggccattcaccgtcattaacagcgcaaaaaactgggtcaacgttactccctgatatttgtcacgagcaatagaacgagagagcaccgaaccacccgcccccgcgatcccttgaataaaacgccagaccaccagccagtaaatattgttcgttgtcgcgcacaaaatggaagaaacaataaacaatagcaacgacaagattaacggacgtttacgccctattttgtcgctcagagggccaaataacagttgtccgacgccaagaccgatcagtgatgcagtcagcgttaattgcgttatggtcgtggttgccgccagttgctcagacatctccggcaaagccggcaaataaagatcggtacacatcgggccgataccggctaaaagaccaagaatcaatgcccatgaaagagagactctagccatattattccttacttgagtgatgacatgccgccgcccagcgactgccagagcgtgattcggtttgtaaaatcagtcagttgcagtgccagcagctcctgctgtgcgctccacaagctgcgctgcgccgtcaacacggtcaggtaatcaccaacacccgtctgatagcgacgcaagccaacatcgaccgtttgttgctcagctttaacatactggcgctgtgcatccagttgctcttcaagcgtggtccgccgcgccagtgcgttagcgacatctttaaatgctctctgaacggttttttcataggtggcaatgagtccacgcttttgtgcttctgcgtaacgaagctgcgccagattacttccgccnnnngaacagcggtaatgtgaccgatggcgtaaatgaccagatctgcattccgtggctgaacaacgacgacaatgcgtcactgccaacaccagcgctggcagtcagcgaaatcgtcgggaaaaagttagcccgcgccgcgccaatatcggcattggcgctcttcaaattatgttccgcttcctggatatccgggcgacgcagcagaacgtcagatgacactcccgcaggaaccagacttatcatctgttccggcaggctttccagtgttcccggtagcaaattttcctcaagcgttgtacctgccagtaagttcagcgcatttttatcctgcatcacttgtgtctgatagctggcaacgctggcgcgcgcttgctgataaacactcatcgcctcactgacatctgtcgctgccgccgtgccaacctgttgctggcgctggataattttcaatgagttttctgcactggtcatcgtttcttttgccagggccaggttgctgttatcggccgccagtgtcagccaggcggtgctgatttcagcaatcagcgttaaacgggtgttctgggctgtaaattcactggcaagccaggtttctcgcgccgcccgagataaactctgattacgaccaaacagatctaacgtaaaactggacaccgtgccgtcagcctcggcagtggtttccgtaccattagccagcgaacgactgcgggttgaacttaaggccgcattcaccgtcgggaataacgacgcattagtttgcccatagagcgcccgtgctgagtcaatatcagcaatcgctttttgcacatcgcggttactgttcagtgcaatagtcaccacctgctgcaatcggggatcgtggatcacctgctgccagtcatggctgattgcctttccctggccctgtgctcccggcaaggtcgccgggattggggattcaggcgtgctgtagtggggatcgagcgagacacatcccgcactcaacagcaccagaaaaataagagaacgacgcaacataacttactcctgacggcgcgatttaccggcaaacaaacgtttcaccagtacaaaaaacagaggaacaaagaaaatagccagcaacgtagcggtcagcgtaccgccaataatgcccgtaccaatggcgatgcggctgttcgcccctgcgccggttgctatcgccagcggcattaccccccgcaataaacgccagcgaggtcatgatgattgggcgtaaacgagtctgcgccgcgcgtaatgccgcacgactcaaggaataaccctctgcaaccgccgcttcagcaaattccacaatcagaatggcgtttttcgacgacaagccgatagtggttaatagcgccacctggaagtaaacatcgttgtttaaatcacgcatccaggccgccagcgccgcgccaagaagccccagagggatcaccagaatgaccgagaacgggactgaccagctttcgtacagtgctgcaaggcagaggaaaaccaccagaatagaaactgcatacagactcaatgcctgaccgctggccagtttctcctgcaatgacaaaccactccaggcccaggttgttcccgcaggaagactgtttgccagttcctccatttttgtcattgcatcgccggaactaaagccagtcgcattttccccctgaatttcataggctgcagaaccgttgtagcgcaccagtctttccggtccatacagccagcgggtggtcgcaaaagcagagaatggtgtcatggcgttatcactaccgcgcacaaaccatttacctaagtctgacggcgcggaacgaaattcactgtcgccctgaatgtagacttttttcacacgaccacggtcaataaagtcattcacataagtaccgccccacgcactggacagggtgtcggtgacatcattcaaactcaaccctaatgacaccgctttattactatcaatatctacctgcaattgcggcatttgtggcaaatcattggcacgaaaagaatgtaactccggactttgattcgctttttctatcaactgattacgcatttgcagtagtgtttcgcgatcggttccaccgttagctaacaattcaaacgtaaaaccattgctttgccccagcccatcaacggctggcggcgtcatcgcaaataccgtggcatcacgaattgtgcccagctctttggttgcccgtagggcgatagcctgggcggtgttttctgcccctttacgttgagaccagtttttcaacgaaacaaacgccatcccggtgttctgtccgctgccgctaaaactgaaaccatcaacggtaaaaatgacatcggtatttgctttctcgttaatcaggaaccagtcaacaatctggcgattcacttctgctgtacgggcagcggtcgccccggccggcagcgtgtactgcaccatgatttcgccctggtcttcagtgggtaagaaactgcccggcagtttccacatcatcagggccattccaccacccagtacgagataaagccccatcgttcgagcagcacggcgcaggacataaattacgcctcgctgatatttatcttcagtacggcggtaaaagcggtcaaatgcgccgaaaaagnnttttttatgtggcggaacatgctggaggacggaaccgcacagggcgggagtcaaggtcaatgccaccaccacggaaagcagcattgcggagataatggttatcgaaaactgacgataaattacccccgtagatcccccaaagaaggccataggcaggaatacggctgacaacaccagcgcaatggcaaccagtgcaccagaaatctcgcccattgatttttccgtggcttcacgcgcgggcaaccctttgtcacgcataatgcgttcgacgttctccactaccacaatggcatcgtccaccagcaagccgatcgccagcaccattgcaaacaacgtcagggtattaatcgaatagccaaacaacgcaagaacgccgaatgtgcccagcaaaacgacggggacagctaacgccggaatcagtgtggcacgcaggttttgcaggaataaatacatcacgcaaaccaccaatacgatggcttcaaacagcgtctgaattacgtcctctacagagattttaataaattcagtgctgtctttcgggtaagcgatgtcgtatccctgcggcatgttccgctggaattcggcaatcttatccttgaccagcgtcgccgtattcagcgcattcgcaccgggcgaaagcattacagcaaccccggcagacgggtgaccgttaagtttgccgatagcggtataatcttcactgcccatctcaacgcgagccacatcttttatacgaacaactgcgctgtctgactggcttttcacgataatatttttgaactgatccaccgtctgcaagcgagactgcgcacgaaccgttgcggtcagttgctgagtattcggtgaaggcaatgcccctattttcccggcagtaacctgcacgttttgcgcttcaatagcactttgcacgtctgaaggcattagcgagtaagacgccagtttggccgggtcaagccagatgcgcatagcgtattccgcgccaaagacttgcagactccccacaccttcaacacgcgccagcgggtcctgaacgttactaaccaaccagtcggcgatatccgaactggaggctttgtcagtggtgtcatacacggcagcaatcagcaaaaagttgctttgtgatttctccaccgtaacacccgtttgctgcacttcgctgggtaggcgcgactccgcctgctgaattttattctgnacctgtgcagtatctggatcggtaccttgttcaaaggtcacattaatactgaccgaaccatcagagctgctggttgagctgaaatagagtaaattatcaagcccagtgagttgttgctcgatgacctgagtcacgctgttctccagcgtttcggcagaagcaccagtataagtggctgaaattttaatggtcggtggcgcaacgtcaggatattgcgcgacgggcaatgtgcgaatagccagaatccccgccaacataatcaaaatggcgataacccaggcaaagaccgggcggcgaacaaaaaagcgcgaaaacatcaggcgttgcctccattagcctgaacttcaacagccttgaccgtctgccctgaagtgactttggcagaaccttcaacaatcagtcggtcgccgctgtgcaggccgtttagcaccagccatttatcaccatatgtttctcccgtttcgagcgttcgctgctctactttattgtctttattcaccaccagcgcagttgcattgcctttagcatcgcgcgtgacgccctgttgcggcgcgngaatagcgtcttccatcacgccttcatcgacacgagcgcgaacaaacattcccggtaataattgctgttgtggattggggaaaatcgcccgtaatgtcaccgaaccggtagactcatctacagcgacttcggtgagttccagacgccctttttcgctgtaggttgtgccatcttccagaataagtgagacgctcatggtgtcactgttggtcgccagtgactgtttacgcagacgtaataaatcgacactggagcgagtgaggtcgacatacattgtatccagaccacgaatagtcgttaacgctgtatcttgcgacgcggtcaccagtgcgccaggggttaccgacgaaatgccaatgcgccctgaaatcggtgcggttaccgtggtccagtcaagattaatgcgcgcagtttccagtgcggcttttttcgccgctacactggctttatcttgtgcacaggtagactgagcatcatcagcatcctgttgtgaaacaccgttctctttcaccagtcgggcataacgctgcgctttctggcaatcggcttttaccagtgcctgtgcttgttgtaatgctgcccgagcttcattccatgcagcctgataactggccgcatcaatctggtagagcggctgtccagccttgaccagatcaccttccttaaataagcgtttctggataattcccccaacctgcggacgtacttcggcactgagcgcagcactggtgcgtccggttaattcactgactaccgagaccggttgagatttgactgtaacaacgccgacttctgtttctgacggggatgaattgttactttgcgtattatcacaaccagataagagcagcattgccactacagatgttgctatatacttcattattttctccagggtgagaaataccctcctcattaaaattaatgaggatatgtcagggatattcagttataacgaacccgcatcgcgaaatgaatttcgcaatgaaataagggggattaatatcccccgctattggttaattctgttcttatttatttatcaacatactaacaatatcctgatatatttcctgcagatgttgtggatcgcttttttgcggtgttaaacgacgataaaccgtaccttccatcatggtagcaaacacttcaacgcagcaacgaatgtgctcctcgctaagatggggatgcattcttttcatatgtgcacaaccgttagcgaacattctggcgtcagcttcttcaagcattgccataacccgcgggttgcgtgtggcttctgcagccacttccagcatcagcgcgtcgtcgtcctcatttaaggatttacgcaaggcaaggacttccgggaagtgatcggtacgcgcgtcaatgtccatttgggcaatacgaaagtcgatgatacggcgaaccatctcttcaataatggcgtctttgttggcgaagtaacgatatatctgacccacgctaagctgagcttcgctggcaatttgcgacatactggcggcatgaaacccgcagcgacgaaaacaccgacgggcggcgttaatgatttcatcctgacgctgtttgtggcgtatttccagcttgctggtcatttctgtctcctggcctatcacttggtgagaatgatcgttctcatttttgctgattatacgtttctccaaagtaatggaaagtatttttatcttattcatggtgcatattctgataatgaagagattgtggagattctgtgaagatagttgacaatattaagttggggtcaattcatcagaaaggctgctacttgttgtcgccagttctgttttcatcatcaaacttatcggagctaatacgaatagtttcatagtcagattctataagatatttccccaacctaccccttgcaggcgtcaagagtagataacgcaaaatgctctgtaccgcagcttctctccggtacagaaagcgcaactatagccacccacagccaggttgattataataaccgtttatctgttcgtactgtttactaaaacgacgaatcgcctgattttcaggcacaacaagcatcaacaataaggattaaagctatgggttttctttccggtaagcgcattctggtaaccggtgttgccagcaaactgtccatcgcctacggtatcgctcaggcgatgcaccgcgaaggagctgaactggcattcacctaccagaacgacaaactgaaaggccgcgtagaagaatttgccgctcaattgggttctgacatcgttctgcaatgcgatgttgccgaagatgccagcatcgacaccatgttcgctgaactggggaaagtttggccgaaatttgacggtttcgtacactctattggttttgcacctggcgatcagctggatggtgactatgttaacgccgttactcgtgaaggcttcaaaattgcccacgacatcagctcctacagcttcgttgcaatggcaaaagcttgccgctccatgctgaatccgggttctgccctgctgaccctttcctaccttggcgctgagcgcgctatcccgaactacaacgttatgggtctggcaaaagcgtctctggaagcgaacgtgcgctatatggcgaacgcgatgggtccggaaggtgtgcgtgttaacgccatctctgctggtccgatccgtactctggcggcctccggtatcaaagacttccgcaaaatgctggctcattgcgaagccgttaccccgattcgccgtaccgttactattgaagatgtgggtaactctgcggcattcctgtgctccgatctctctgccggtatctccggtgaagtggtccacgttgacggcggtttcagcattgctgcaatgaacgaactcgaactgaaataatcgttctgttggtaaagatgggcnnnngttctgccgcccgttatctctgttatacctttctgatatttgttatcgccgatccgtctttctccccttcccgccttgngtcaggataacgatttcctttacgaccaaggagcgcccatggaacaacgccacatcaccggcaaaagccactggtatcatgaaacgcaatccagtactacggagtatgacgttctgcctctggtcccggaagccgcaaaggtcagcgatccctttctactcgacgtgatccttgaaaaagaaacgctggcccccttcctttcatggctggaccctgcgcgtgttcttgcagtggagttgttccctgaccagcttaccgtgacccgttcacagaccttcaccgcttatgaacgcttgtcgacggccctgacggttgctcaggtttgcggcgtccagcggttatgtaactactattcggcgcgacttacgccgctccccgggcctgattccaccagggaaagtaatcatcggttggcacaaatcacgcaatatgcccgccaactggctagctcgccttctattatcgacaaccgatcgcgccagcatctgaatgacgtcggtcttactgcctgggactgtgtgatcattaaccaaatcattggttttattggctttcaggcgcggacaattgcgacatttcaggcttatctcgggcatccggtacgctggttacccgggctggagatacaaaactacgccgacgcgtcactgtttgctgatgaatcattacgctggcgaagcagctatgaggtggaaaaactacctgaagaacacacaaaaagttcaactgcagaactttgccaactggccgaaatactctctctccaccctatttcactttcccttctcgaaaggttgttaaacagcacacgggttaatacacagccggataatcagcttgcggcgttgttatgcgcgcggataaatggcagtcctgcttgttttgccgcctgtatggattcatcaaatgaatataaaaaaatcagcacccttctgcgcaagggcgaaaatgaaattaaccaatgggctgaccgtcattctgttgagcgcgctaccgttcaggcgatacaatggctgacccgagcacccgatcgctttagcgccgcccagttcagccctttactcgaacacgaaaaatcatcaacgcagattattaatctgctggtatggagcgggctgtgtggctggataaatcgcttaaaaatcgcgttgggtgagacatattaaccttgccgcgtcagacagattcgcgtaaaactgtcagccgctctaatggccaccaaaatagacaattatgtttcaggacaacccgctgctagcgcagcttaaacagcaactgcattcccagacgccacgcgntgaaggggtggtaaaagccacagaaaaaggttttggcttcctggaagtcgacgcgcaaaaangttatttcattccgccgccgcagatgaaaaaagtcatgcatggcgaccgaattatcgcggtgatccacagtgaaaaagaacgtgaatccgcagagccagaagaactggttgaaccgtttctgactcgtttcgtgggtaaagttcagggcaaaaatgaccgtctggccatcgttcctgatcatccactcttaaaagacgccattccttgccgcgcagcccgtggtctgaaccacgagtttaaagaaggcgactgggcagttgccgaaatgcgccgtcatccgctgaaaggcgatcgttctttctatgctgaactgacacaatacatcacttttggtgacgaccactttgtaccgtggtgggttacccttgcgcgccataatctggaaaaagaagcaccagacggcgtcgctaccgaaatgctcgatgaaggtctggttcgtaaagatctgaccgcgctggattttgtcaccatcgacagtgccagcacagaagatatggatgacgcccttttcgctaaggcgttgccggatgacaaacttcagctgattgtggcgattgccgatccaaccgcgtggattgctgaaggcagcaagctggacaaagccgcgaanattcgcgcattcaccaactatctgcctggcttcaacatccctatgctgcctcgcgagctttctgacgatctctgctcactgcgcgccaatgaagtccgcccggtactggcatgccgcatgacgctctccgctgatggcaccattgaagataatatcgaattctttgccgccaccatcgaatccaaagcgaagctggtgtatgaccaggtttctgactggctggagaataccggtgactggcagcctgaaagtgaagcaattgccgaacaagtccgtttgctagcgcaaatnnnnnnnnnncgcggcgagtggcgtcataaccacgcactggtgtttaaagatcgcccggattaccgctttattctcggtgaaaaaggtgaagtgctggatatcgtcgccgagcctcgtcgcattgccaaccgtatcgtcgaagaagcgatgattgccgctaacatttgtgcagctcgcgtactgcgcgataagctcggttttggtatctataacgtgcatatgggctttgatccggcgaatgccgacgcgctggcagcgttgctgaaaacgcacggtctgcatgtcgatgccgaagaagtgctcacgctggacggtttctgcaaactgcgtcgtgaactggatgcgcaaccaactggtttcctcgacagccgcattcgtcgcttccagtcatttgctgaaattagcactgaacccggtcctcactttggcctcggtctggaagcatacgccacctggacttcgccgatccgtaaatatggcgacatgatcaaccaccgtctgctgaaagcggttatcaaaggcgaaactgcgacgcgtccacaggatgaaatcactgtccaaatggccgagcgtcgccgtctcaatcggatggcagaacgtgatgttggtgactggttatacgcacgcttcctgaaagacaaagccgggaccgacatccgtttcgcagcggaaattgtcgatatcagccgtggcggcatgcgtgttcgtttggttgataacggcgctatcgcctttattcctgcatctttcttacacgctgtgcgcgatgaactggtttgcagccaggaaaacggcaccgtacaaattaaaggtgaaacggtttataaagtaactgacgttattgacgtcaccattgccgaagtccgcatggaaacccgcagcattattgcgcgnccggtcgcgtaatctcctttcacggcccattccttatgaatgggccgtttatttccccgctctaccttcatcatatcccggcagttttttaactgactttcgtttgaaaactggcgtttttccaaaactagattacaaataaatatataaaaaaaacaatgtgtttagccgccgttaatttcatgtaagtcatgttgttccttttatttaaccgcggactccgctgttaaccggaggatatgcatcatgaaaaccgttagggagtccacaacgttgtacaactttctcggatcgcacaatccatactggcggttgacggaaagcagcgatgttttgcgcttttctaccaccgaaaccacagaacctgaacgtacgttgcagttatctgccgaacaggctgctcgcatcagggaaatgacggtcatcacctccagcctgatgatgagtctgaccgtcgatgagagcgatctttctgtgcatctggtaggacgaaaaatcaataaacgggaatgggctggcaacgcgtctgcatggcatgacacaccagcagttgctcgtgatttatcacacggactttcctttgctgagcaggtagtttctgaagcacattccgcaatagtgattctcgacagccgggggaatatccaacgcttcaatcggttatgtgaagattacacagggttgaacgaacacgacgtcattggccaaagcgtgtttaaactgtttatgagccgtcgtgaagctgcggcatccaggcgcaataaccgtgtattttttcgaagcggcaatgcatatgaagtcgaactgtggataccaacacgtaaaggccagcggctgtttctgtttcgcaataaatttgtccacagcggcagtggcaaaaacgagatttttttaatctgttccggcaccgacattaccgaagagcgccgcgctcaggaacgactgcgtattctggcaaataccgacagtatcaccggactgccgaatcgtaacgcaatgcaggagttaatcgatcacgctattaatcaggcagataacaataaagttggggtcgtgtatcttgatttggataattttaaaaaggtcaacgacgcctatgggcatttgtttggtgaccagttattacgcgacgtgtcattggctattttaagctgtctcgaacatgaccaggtgttggcgcgtccaggtggcgatgagtttctggtactggcatccaacacctcacaaagcgngctggaagcaatggcatcacgaattttgacccgcttacggctcccctttcgcattggtttaattgaagtttataccagctgttcagtaggtattgcactctctcccgaacatggttcggacagcgcggctattattcgtcacgccgacacagcaatgtacacagcaaaggaaggcggacgaggacaattttgcgtttttaccccagaaatgaatcaacgggtatttgaatatctctggctggataccaacttgcgtaaagcactggaaaacgatcagttggttattcactatcaaccaaaaatcacctggcgtggcgaagtgcgcagtctggaagcactagtacgttggcagtcacctgaacgtgggttgattccaccgttggacttcatttcctacgcagaagagtcagggctaattgtgcctttaggccgttgggtgattctcgatgtcgtacgccaggtggcgaagtggcgggataaaggcattaacctgcgagtggcggtaaacatttctgcacgtcagctcgccgatcaaaccattttcaccgccctgaaacaggttctccaggaactcaattttgaatactgccctattgatgttgaattgacagagagttgtctgattgagaatgatgaactggcactgtctgttattcaacaatttagccaactaggtgcgcaagtgcatctggatgattttggtaccgcctactcttcactttcgcaactggcgcgctttccgatcgatgccatcaaacttgaccaggtttttgttcgagatattcacaaacaacctgtctcgcagtcactggttcgggcaatcgtcgctgtggcccaggcattgaatcttcaggtgatcgccgaaggtgtagagagtgcaaaggaagatgcttttttaaccaagaatgggatcaatgagcggcaaggatttttgtttgccaaaccgatgcccgccgtcgccttcgaacgctggtataaacgctatctgaagcgcgcataagtagatgaatatatatacttagcgctatattccgtcattatatatcgtattcccggatgataattagccgttgctgttaaacacttctcttttagcggcaatttttgcattattcattttcccccttttgctataaggatgtccttgatgtctgaatttgatgcccagcgcgttgccgaacgtattgatattgtgttagatatccttgtggcaggcgattaccactctgcgatccataatctcgagatacttaaagcagaactcttgcgccaggttgctgaatctacgccagacatcccgaaggcaccgtgggagatttaacaatcgtgccttcaggttttccctatttgaggatgcccggcgcgtcagtatttttttatttagtattannnngttataagaattacagcgatgaattcccgacaacaaactattctacagatggtcattgaccagggtcaggttagcgtaaccgatctggcaaaagccactggagtttctgaagttaccattcgccaggatctcaacaccctcgaaaaactgagttacctccgccgtgcacatggctttgcagtttcgcttgatagtgatgacgtcgaaacccgtatgatgagcaactatacgctgaagcgtgaactcgccgagtttgccgcgtcactggttcaaccgggcgaaaccatctttatcgaaaatggcagcagcaatgccctgctcgcccggactctgggggagcagaagaaaaatgtcactatcatcacggtcagcagctacatcgcgcatttgctgaaagacgcgccttgtgaagttattttgctcggtggcgtgtaccagaaaaaaagcgaaagtatggttggcccgttgacacgccagtgcatccaacaggtacatttcagcaaagcatttattggtattgatggctggcaacctgaaactggattcaccggtcgcgatatgatgcgtaccgatgtggtgaatgccgtgctggaaaaagagtgcgaagcgatagtcctgactgacagctcgaaatttggtgctgtacattcatactccatcggtcccgttgagcgattcaatcgcgtgattaccgattcgaaaatacgcgccagcgatctgatgcatcttgagcacagtaaactcaccgttcacgtcgttgacatttaaccatttcccttctctacggatgatttgcagtttgacaaatcatccgctctaagatgattcctggttgataattaagactatttacctgttattaacactctcaagatataaaattattatcagcgatataacaggaagtcattatcacctgcgtgatataaccctgcgcgcgagcggatttcacggaataatttcaccaggcttattcttagctattatagttatagagagcttacttccgtgaatcataaattcaggagagagtattatgtttgtaacgagcaaaaaaatgaccgcggctgttctggcaattaccctggcaatgtctctgagtgcctgttctaactggtctaaacgggaccgcaacaccgcaatcggcgcgggtgcaggggcattaggcggtgcagtactgaccgatggcagtacgttgggtacattaggtggcgcagctgtcggtggtgttattggtcaccaggtcggtaaataatcgtaaataaatgtcgattatcgactcgtaattataatacgcttgattctgttcagtacgaaataactgaataatacacacagtaaaatattcgaaagccacggatatatccgtggctttttatgttaaccgcctgcgagttttaccttcatccctttcgcttcaagtagtgattttaataaatcacgcttatcgccctggatttcaataactccatctttaactgctccgccgcagccgcattttttcttcagttccgctgcaagttttgtcagttcggcatcatcgagatcgataccggtaatcaggcaaacgcccttacctttacgtccactggtctgacgctgaatacgcaccacaccatcgcctttagagcgtactggggccgctttgggctcatcaatacgcccggtttctgttgagtagaccagacggctgttggaatcactcatcatgcactccgctgtaaagaggcgttgatcgctttcagcgtctgcgctggatctaccgattgcgttaccgggcgaccaatcaccatataatcaacaccagccgccaacgcctgttctggcgtcataatgcggcgctggtcaccagcttcactcccctgcggacgaatgcccggcgtaaccagtttgaactcctgaccgaatacctgtttaaagcgcacagcttcctgagcagaacacaccacaccaacaaggccacatttttgcgtcagtgctgccagacgttctgcataatctgcaggtgacagtgtcacgccaagatcggccaggtcgctggcttccatgctggtcaacactgtcacagcaatcaaaagcggtgcatctttgccaaacggaaccagtgcctcacgcgctgcggtcatcatacgcgccccaccagaggcatgaacattcaccatccacacgcctaagtcagctgcagcagcgacagcgtgcgctgcagtgttggggatatcgtggaatttcaggtcaagaaagatatcaaaaccacgctgttgaagttcgcgcacaaactgtggcccaaacaatgtaaacatctctttgccgaccttcagacgacaatcgcgtgggtcgatcttgtcgacaaaggccagcgcggcatcacgattatgataatcaagggcaacaaccacaggagaattcgtaacagcgcgggaagaagatgaagcagttaacgtcatgaccagaccttcttgatgatgggcaccggaagtggcgcgaaacaggtaaacggcgagcattctacccgtggaaataaaaaattaacagttgcgatttctcccctggcaggctttttctgcgccgccgttgccggagcacaatgggacataaataactagtatgttgtaactaaagtcggtttttttaaaannnnacaggccatcaagaccgcgaatcggtttaatagttgaccaggcacgacaagacggacaatgccagtagagggtgtatgcggtgaaaccacatttctggcagcgataacgaggcttactacgtaccttctcgccaaccatgtcacgcagcaccatcaggctctctttggcacgcccttcttccgcttcatttaagtggtaatccattaacttatggaacacacgcatggtcggatgacgctgaagctggcgcgtaatatagacctgtgcggcctcactaccgtcgcgcgcttcgatgatatcagcaagcatcaattcagcatcggcaccggtgttctcttccaccgcgcgctgcaggaattctgcccattcggcagttttacccaactgctgatagcaggtttgcagcatttccagcgtttcgctgaccagttctctgtcctgggatatcacgcgttgcaaactttcgacggctttggcgtattctcctttcgccataaacacgcgtcccatcatgatggatacgcgggcgctgtttttatctgccgcnnnccctttttttagcaaggtcatggcacgatcgagatcgtcgctggccatatgctgcagggctaactcacagtagaaatgggcaatttcgacgcgctgtttatctttacccagcttcaccaggcgttcggcaacatcaattgctttctgccactcactggtagcctggtagatttgtagcaactgttgcagcgcgccaatgcggaagtcagtttcatcggtcagctgattgaacatgtcttccgcgcggtcatataacccggcggccatgtaatcacgccccagttgttgaatcgccaacagacgctgttcataggtcagcgaggcgctttccattagggtctgatggatgcgaatagcgcgatcaacttcgccacgcgaacggaacaggtttccgagcgtaaggtgggcttcaacggtgcctgtatcctctttaagcatatcgagaaacaggtctaccgctttatcctgttgattactaagcaggaagttaacccccgctacgtaatcacgcgacaagcggttggcttcatcttgcttgttttgttgcgcacttctgcggcccatataccagccataggcagcggctacaggcaaaagcagaaacaacaactccagcatagaaagttattccttcgccgctgacgagtgctgcactacagccacgtcagtcgcgggtgaaagctggttttccagtcgctttattttacgttcagngcgcaccagggaaacacgaactcgcagccagaacaggccacaaatcaaccaaccgatagcaaaacccgcagcaaacaataccgccagcaatgtggaaatacggtactccccttgcgctaacagataattaaacgtcacctgttgatcgttctgcgcacccaacgtgaccgaaatcacgaagatcgctaacaccagtaagaaaatgagtaaatatttcacattacttcccgttatgtggttagagcgaataaattatggtcaacttaccgcaatagccctttaaagtaccattttcgcgccgtctgcgaaatggcatccacgcgcattgttgatgatttaagggctaaattcggaaaatcaaccagcgttaactttcttgttctcgttgcgctatttcgcgattttcttccgcaggtggtgttaatggcccgcaaattcgttgcgcaagccacgttgccaccgccaccagtgcccacgaaatcaacgtagctaccaccagatcgcgtggccaatgcatcccgagcagcaggcggcttcccatgactcccgttgcccagaccagcaagatagcaatggttaacgttcgccgacgcggccacagcaaaccaacggccagcagtgcccaactggcagcaaacatcgtgtgaccggaaggaaaggcaaaccccgtctctttctgccagtgtgaacgcaaatattgtggaatatttttctcttcagccaactgttctttcactagatttccgcgttctgctcgctttaaagtgtagaactcatcaaccggaatatgatgtgttttttccagccagataacaaaaggtcgtggttcctggactttgtctttgatccaggatttaacgccttgtcccacaaggattgcggccgccagaatggcaaataatacaaaggcagccttaatgcgaaaacgcagacaccagagaaaccagccgaataaaatcaaatgtgtaatgacgccccagggctgggtgacagtttcagtaacccaaaaagccgctnttagtagccaactttgttctccaggttgccaacgccagccagaaatccatacggctactggcataacaagcaatagtgcagctcccactgcggtacgtctggcaatcgaacgcatggcctctcctttttgataagtcccacaatcataactgaaaatgccagttccaggaaaaattgacnnnatttgtgccattccgtgaacgatcgannnntcgtgattaggtgaaccccttctcgttatggcaaaataagccaatacagaaccagcattatctggagaatttcatgcagcttaaacgtgtggcagaagccaaactgccaaccccatggggcgatttcctgatggtgggatttgaagaactggcaaccggacacgatcatgtcgcgctagtctatggcgatatttccgggcataccccggtacttgcgcgcgtccattccgaatgtctgaccggtgacgccctgttcagcttgcgctgcgattgtggcttccagctcgaagcggcattgacgcaaattgccgaggaaggccgtggtattttgctgtatcaccgtcaggaaggtcgtaacattggtctgctgaataaaatccgcgcttacgcactgcaggatcaaggttacgatactgtagaggctaaccaccagttaggcttcgccgctgatgagcgcgacttcactctttgcgctgatatgttcaaactccttggcgtcaatgaagtccgcttgttaaccaataacccgaaaaaagtcgaaattctgaccgaagcggggattaatattgttgaacgcgtaccattgattgtaggtcgtaaccccaataacgaacattatctcgataccaaagccgagaaaatgggccatttgctgaacaaataaccctcttgcattgtgtaattaatttgcttgccggaagcaaaataaccggcaagcaaatacttgttacttcaacatattacgaatgacataatgcaaaatgccgtcgttctggtagtaagtcaactccgtcgcggtgtcgatacgacaacggcagggtacgacttcctggctaccatccgcgcgcgtaagcgtcaccggaaccgtcgcgccgggttgtagattttgcagatcgccaatatcaatcttctcttccccggttagccctaacgttttacgcgttacgccttgcggaaattccagcggcaggatgcccatgccaattaaattcgaacggtgaattcgttcaaacgattcggcaatcaccacacgaataccaagcagacgcggaccttttgccgcccagtcacggctggagcctgatccatactctttcccggcaatcaccgccagcggcgtttgctcctgcttatagcgcatcgcagcatcataaatagagactacgtcgctgtcaggtaaatgccgcgtcatccccccttcaacgccaggcaccatttcattacggatgcgaatattggcgaaggtgccgcgcatcatcacttcatggttaccacgccgcgaaccgtaggagttaaagtcttttcgctcaacaccccgaccttgtaggtatcgacccgctgggctgtcgggcttaatactgcccgccggagagatatggtcagtggtgactgaatcccccagcattgcgaggatccgnncaccgtgaatatcttccacaggtgctggcgttgcctgcatttcatcaaagaaaggcgataaacgaatataggttgaatcctcctgccatccgtaggtatcggatcgtgcgacgttaatttctttccactctgcagtgccttcaaagacttctgcgtactctttgcggaacatttctgtggagacttgttctaccgcacgggcaatttcttgtgccgatggccagatatctttcagatatattggatcgcctttacgatcatgaccaataggctcagaagccaggttgatattcatatttcccgccagcgcataggcaaccaccagcggcggcgaggccagccagttagttttaaccagcggatggatacggccttcaaagttacggttgccggacagcactgcaccgacggttaaatctccttttttgattgccgtttcgataggatcgggcagcggcccagagttaccaatacaggtggtacaaccgtatcccacaaggttaaaccccagttcgtcgagatacggtgtcagtttcgcttttgccagatagtcagaaacgactttcgaacccggtgccagcgacgctttgacccacggttgccgcttgaggccaagagttacggcttttttcgccagcaagcctgcggccatcagcacacttgggttagaagtgttggtgcacgaggttatcgcagcaatgaccacagcgccatcaggtaactgatactgatgtccgttcataacataatcgaccggctggcgatctttatgcgtggcattcacttccagttcgttactggcggcaaatgcttttggtacatcgggcagtgcaacgcgatcctgtgggcgtttaggccctgccaggctcgcttcaacgtcattcatatccagatctaacgtactggtaaaaatcggttcatcgcccgggttacgccacatgccctgcgctttggcatatttttcgaccaactcgacctgatcttcgctgcgcccgcttaaacgcatgtaatcgagggttacagcatcgattgggaagaagccacaggtggcaccatattctggcgacatattggcaatggtggcgcgatccgccaacggtagtgaatccagaccatcaccataaaattcgacgaatttccccaccacgccatgtttgcgcagcatttgggtaacagtgagaaccaggtctgtggcggtaataccttcacgtaattttccggtaagtttaaagcccactacgtccgggataagcatggaaaccggctggcctaacattgcggcttctgcttcgatgccacccacgccccaccccagcacgccaaggccgttgatcatagtggtgtgcgagtcagtaccaacgagtgtatccggataagcaatccattcaccgtcctgcaattcgctccacactgctttgccgagatattcgaggttaacctgatggcaaatgcctgtgcctggcggcacgacgctaaaccgactgaacgcttgctttccccatttcaggaacacataacgttcgtggttgcgctccatttccaggcgtacgttttcttcaaatgcctcatcatcaccaaaacgatcgacggtcaccgagtggtcaatgaccaggtcgaccggtgagagcgggttaacctttgcagtatcgccaccgaggcgtttaaccgcttcgcgcattgccgccagatcaacaacggcaggtacgccggtaaagtcctgcatcagcacccttgccgggcggtaggcaatttcacggtcagcatgggcatttttcagccatcccgccagcgcgtggatatcctcttcggtaaccgagttaccatcctgccagcgcagcagattttcgagcaaaactttgagtgacttgggtagacgggtgatatcgcccagtgatttggcagcaagcggcaggctgtagtagtggtaagttttatctttggcctgcaacgcgtccttactggcttctcgtagggttgacgacatagctcctccttaatgacagggttgcgaagccctgattctcttcagggtgaatattaaagataacacaaacatcgcgtaacgatttgataacaacccaaattgataaaagaggagaaaccttgtggcaaagcaaatgacaaccccgccgcagcggggtcaaggatcagtgagtaatgatccagaggagttcggcccagaagagcatcgacagagaaaatgcacccatccaggaccaatatttcatatttgtgttgatcataggctacacccttaacggttattactttgtgttgagataactcaacctgttattgctgcggtgtattaaaagccctttaattcattaaaaatgggtaataataatgatgataattattgtttcggctgatcatcttcagcaaacagttctataaaggcttgctgctgcgatgttagttgccagtcgtctggaataacgacggaacattcccgtttcgtttcgggttcattgtcactatgctggcataatggtgacgactccagttgctcctgaccaaccatagttatccccacactttccaaatcagcagtgcgacaaccacccagaaaagtgcagaaccaagaaaaaccgccagccaggctttacgttttaattcaggatcgcggcggggttcctgatttccagaaggcattgctaacctcatataatcgccatcacttatcagcaagacgttgaacgattggtgtaattaatcatacgatgagacaaatcctaaagaaactttagtcaaaaatccagcgaatttacgaatcgtctccagtgaataattcaatcttttgacctgaaatagatatttgaaaactggaatttgcgaggcgggtaattagacactactttacaggtaatttaccctataaatatgagggataaaaatattgtgcacggtatacaaataagtaacaaaagagaatatattccggcaccttcgctacataaaaggtgccgaaaataacgcaagaaattatttttccggcagttttatatctttaaacatgacctcaatttcttcattggagcgcaatgcgacagccgcatcaacgacatcacgcgttaaatgcggtgcaaaacgctgaatgaaatcatacatataactgcgcaaaaaagtactacggcgaaaaccaattttggttgtactgtggctgaagatatcgtgagcatcaacacgcacaaggtccggatcggcgaccggatccaccgccatgctggcaatgacccctacccccagccctaaccggacgtaagttttaatgacgtcagcatccgttgccgtgaaaacgatacgcggcgttaaccctgcgcgattaaaggcagtatccagttctgaacgtccggtaaagccgaaggtatatgtcaccaacggatattgcgccagttcttcaatggtaatggcttttttgcctgccagcgggtgatccggagtgactacaatagcccgattccagtggtagcacggtaacatcactaaatcttcatacagatgcagcgcttctgtggcgatagcgaaatctgcattacctttagagacggcatcagcaatttgtgtcggcgagccctggtgcatatgcaaagaaacgcggggataacgctcaataaagcctttgatgacgtttggtaacgcgtagcgtgcctgggtatgcgtggtggcgatatacagcgagcctttatccggccaggtgtgctcaccggcaaccgattttatggcatcaactttcgacaggacttcgcgagcgatacgaattatttcttgtcctgctggcgttacctgcgtcaggtgcttgccgcttcgggaaaaaatttgaatgcctagctcgtcttccagcattctgacttgtttactgatcccgggttgtgatgtgtaaagtccttccgctgttgatgagacattcaggttatgattgaccacctcaacaatatagcgaagttgttgtaatttcatgttaaaccatccacttagacgccatcaggacatcgttttttcgtcacacctggcgggtgactaatacgatttaataataaaaaaggtgctaactataaccactatatcatttatagccttagtgtataggtgtgaagaaaaaataatatgcaataaaaaagggccgctttcgcgaccctttgtttataaaaacctgacagaattaaaggttattttttcccttcaacccatttgccatcaacataaaatgctgaccagccagtcgcctttccgtctttttccgaagagacatattgctgtttggttttacggctaaagcgaaccatagtcttattaccttccggatcctgctgcggcgcatcggccagataacgcagtttttccggcagacgatcgcggaagcgatacagctcttccaccagcggcgcacgcgtttcacgcgatttcgggaaggtattggccgccaggaacacaccggcagcaccgtcacgcagcacgaaataggcatctgatttttcgcacggcagctccggtaatggtaccggatcttctttcggtggagccacttcgccgttacgtaaaatcttacgcgtgtttttacactcttcgttggtgcaggccatatatttaccgaaacgccccattttcaggtgcatttcagaaccacatttttcacactcaacgatcgggccgtcataacctttaatgcggaattcgccctcttcgatctcgtaaccgtcgcaggttgggttattaccacagacatgcaacttacgtttcggatcgatgagatagctgtccatcgccgtgccgcatttggggcaacgacgttttgcgcgcagcgcgttggtttcagcgtcttcgccttccagcacgttcagcacttcgttttccggcaccaggttaatggttgttttgcaacgctctttcggcggcagcgcatagccagaacagccaaggaataccccggtgctcgctgtgcgaatccccattttgcgaccacaggtcgggcagtcgatgctggtcagaaccatctggttcggacgcatacccccctcttccggatctttttcagctttatctaactgctgagtgaaatccgagaagaagtgatccagtacagctttccactctgcttcgtgatttgccacctggtcaaggctgttttccatctgcgcggtgaagtcgtagttcattaactcgcggaaattctcttccaggcgatcggtgacgatttcgcccattttttccgcatagaaacgacgattttctactcgcacatagccacgatcctgaatggtcgaaatgatcgacgcataggtagacggacgaccgataccacgtttttccagttctttaaccagcgatgcttcactgaaacgggctggcggcttggtaaagtgctgggctggtgtcagttcaacgagcgtcagagcatcgcctttatcgactgcaggtaagatacgatcttcatcgcctttacgcagtgcaggcatcactttcgtccagccatcaaagcgcaaaatacgaccgcgtgctttcaggcggaaatcgcccgcaccaacggtcagcgtcgtggagtcatatttcgctggggtcatctggcaggcaacgaactgacgccagattaactggtacagtttctgcgcatctgcttccatatccttcagcgattccgccatcacattgacgtcagaaggacgaatcgcttcgtgcgcttcctgtgagttttctttgctggcgtactgattcggactttccggcagatatttcttaccaaaattatcgctgatataaccgcgaaccatatttaccgcgtcctgactcaggttagtggagtcggtacgcatgtaagtgatatagcctgcttcatacaaacgctgcgccatcatcatggtttttttcacgccaaatccaagacgggtgctggcagcttgttgcagcgtagaggtaataaaaggagcgccaggtttactggttgtcggtttgtcttcacgttccagcacgctgtagcgcgctttttccagcagacttaccgcagcctgagtttgttctttgttgaccggacggaacggtttgtcgttctgatgagtcacctgcaacgccaacgcttcaccagatggcgtggtcgtgctggcatcgacttcccagaactcttccggcacgaacgctttaatttcacgctcacgctcgaccaccaggcggactgccaccgactgcacacgaccggcagacagaccacgagcgatctttttccatagcagcggcgaaaccatataccccaccacgcggtccataaagcgacgcgcctgctgggcattaacacgatcaatattcagctcacccggtttgttaaatgcctggcggatcgcgtttttagtaatttcgttaaacaccactcggctatagcgcgcatcatcaccaccaatcacttcccgcaggtgccatgcaatggcttccccttcgcggtcaaggtcggttgcgagatagatgtggtcggctttttcagccagttgtttcagttcagagacgaccttctctttaccaggcaacacttcatagtgcgcctcccaattgtgccacgggtcaacccccatacggttgacgagagcgccacgttcatcctttttaggctttttagccgtcttggtggaggtagagtcggcactctttttggcagctgagccactggtcggcaaatcgcggatgtgaccgacgctggatttcaccacgtagtcactacccagatacttgttgatcgttttggcttttgccggggactcaacgatgacaagagctttacccatattcaccttacctaatttgattcttccaggaatgcgtcgcacgttgataaaccttccactggcaacgagttactgatatggactcgctctctgcggatatcaaccccttgtcgtgactctgttcacgaaaattcaggtgactgagttaacaggtcttggcctacaggcgctatagcacgacgaaattttggtcgaatgtcaagcaaatctattgccagattgacgaaagcgtcacactgtacctgataaaatccgatacgcaactttattagcatgcaaaatccaaagttgccagtaaggcgctcttgccaccagcgtggtatatttgtctgcaagccatgcctggcgtagactaatgtccttgtttaaggagtaaataatgaacaaagagacacaacccatcgaccgcgaaacgctgttgaaagaggccaacaaaatcattcgtgagcatgaggatacgctcgcagggattgaagccaccggcgtcacacagcgtaatggcgtgctggtatttaccggcgactactttttagatgaacaaggattgccaacagccaaaancaccgcggtgtttaatatgttcaaacacctggcccatgtgctttcagaaaaatatcatctggttgattaaagcaaaacgcgaggtcttaccctcgcgtttgtcttttacatcaatggcttttgcccacgctgccaccagcgtagcaataatcgatcggcgctctctgccgcgctgccggtgaatcggtcaatgagtcgtttacgctgcatatagcgtacattgaccacttctcggccttccatcaggctaagaataacttcatcactggtgttgatttcatcaaccaggcctttctctaccgcctgttgtccgtaccagtgttcacccgttgccacctgttcaatatccagagacggacgcatacgcttcacaaaatctttaaataactgatgcgtttcgttcagctcttcgcggaatttctcccgcccttcttcggtattttcacccagcaaggtcagcgtacgcttatactgcccggcggtgtgcagttcgatatcaatatctttgcttttcaggaagcggttaaagttgggcatttgcgccaccaccccaatggaacccacaatagcaaacggtgcggaaacaattttgtccgccacacaggccatcatgtaaccaccgctggcagcaactttgtctaccgtaacagttaatggaatgtttttatcacgcagacgctgcagctgcgaagccgccaacccgtaaccatgcaccatgccaccagggctttccagacggagcacaacctgatcctgcggtttgaatgctgcaagtaccgccgttatctcttcacgtagcgagttcacttcatgggcgtccatgctgcctttaaagtccagcacccagacgcggggtttactgtcagttgacacctcgcccagtttggctttcgcttttgctgctttcgcttcttgcttgtgctttttcttctgcgctttgtgccactgtttttgctgatgtgagtccatcagcgccgcggccagttcttctttcatctccttatactgttcgctgagattgttgacccgtaactcgccacgctggcgtttattacgttgagcaacattgacaataatggcggcaatcgccgcaatcgctagcacaacggtaacgattttcgccaaaaacaaaccatattcagacaacaattccacgagtccccaccttggttaaacaacgctttggctcacagtttacaacaggcatgttaagccgtctcgcagagatgttattgcagcgaaagtatgacaaagtatccattttgcggtgttatcgcccgaggctgattgaaatgcccttctgtttcaggcataaagccccaaagtcataaagtacactggcagcgcgacagacaacgtcgttgaggagtagccatgcattaccagccaaaacaagatttactcaatgatcgcattatcctggtgacgggagccagtgatggtattggtcgtgaagccgcgatgacgtatgcacgctatggtgcgacagtgattctgttgggccgtaatgaagaaaaattacgtcaggtagccagccacataaacgaagaaactgggcgtcagccacagtggtttattctcgatttgctgacctgcaggtccgaagattgccaacaactggcacagcgcattgccgttaattatccgcgtctggatggtgttttgcataatgccggattactcggcgatgtttgtccaatgagcgaacaaaatccacaggtctggcaggacgtcatacaggtcaacgttaatgccacctttatgctcacccaggcactacttcctttattactcaaatcggacgccggttcactggtctttacttcatcaagcgttggacgtcagggacgagccaactggggtgcatatgcagcgtcgaaatttgccaccgaagggatgatgcaggtactggccgatgaatatcagcagcgcctgcgtgtcaactgcattaacccaggcggtacgcgcaccgcaatgcgtgccagcgccttcccgaccgaagatccacagaaacttaaaacacccgctgatatcatgccgctctacctctggctgatgggcgatgacagccgccgtaaaaccggcatgacctttgacgcccaaccgggccgtaaaccaggaatttcccaatgagtgatgaacgctaccaacagcgtcagcagcgagtgaaagaaaaagtagatgctcgtgtggcccaggcccaggatgaacgcggtattatcatcgtctttaccggcaatggaaaaggcaaaaccaccgcggcatttggtacggcaacacgcgcagttggtcacggaaaaaaagtgggcgtcgtgcagtttattaaaggcacctggcctaatggcgaacgcaatctgctggagccacatggcgttgagtttcaggtgatggcaacgggctttacctgggatacacaaaaccgcgagtctgataccgccgcctgccgcgaagtctggcaacatgcaaagcggatgcttgctgattcctcactggatttggttttgcttgatgagctgacttatatggtggcgtatgactatttgccactggaagaagtgttgcaggcgttaaatgaacgtccacatcagcagacggtgattatcacgggtcggggctgtcatcgggatatactcgaactggcggatacggtaagtgagttacgccccgtgaaacatgcgtttgatgctggcgtaaaagcgcagatagggattgattactaatctgtaaaaatgccggatatgacgtccggcatacgttgattaaccgttattacgcccaccagaacgacgtccgccgctcacctgactgtgacgtttcaccgcacgacgaatctgattcgccttcatgcgacgacggtctttttctacagcgactttagagctggtttctggcggcaactccaccagttcgcgcagatagttagtctgggcaagatccagctccgtccagccgccgcgtggcagacctttcggcagtgggatatcaccgtaacgaacacggatcaggcggcttacctgcacgccaaccgcttcccacagacgacgaacttcacggttacggccttcggtcagagtcacgttgtaccactggttgatcccttcgccgccgctgaacttgatggttttaaaggctgccggaccatcttccagctgcacaccacggcttaaatcacgcagtttcgcgtcgtcaacctgaccaaatacacgcacggcatattcacgttcaacttcacggcttggatgcattaaacggttagccagttcaccgtcggtggtgaacagcaacagaccacaggtgttaacgtccagacgacctacggcaatccagcgtgcaccgcgcagctttggcagacggtcaaacaccgttggacgcccttccggatcgttacgggtacacaactcaccttccggtttataataggccagaacgcgacaaatttgttcagcggactcacgtaccgaaatcaggtgaccatcgatacggattttcaatccaggggtaacttcaacgcgatcgccgagtttagcaattttgccatcaacactcacacgaccggcttcaataatagattcgatttcacggcgagaaccgtggccggcacgcgccagcactttctgtagcttttcgctcatagagcttccttttggtgtcgccttcccaggcgtctgatatgcttttgtgcaacagtgagtcagaacttacatctgactcactgatagtaaagtctgtttgaactcttcaggccttaagtaaacgactcgacgttttaactggcctggctttgaggcgcaacatactacactatctttatggttaaagcttgtttcgattaacatcagcttaattaccagccaccaccgcctccgccacccgcagcaccaccggaataacttcgccccaataaactggtattggcccccagactcaggtgcatctgtaatgagaacaaaacgccactacgggcaatttccggggcgcgaacagccgctgtgagtgatggggtgatacgtgctacccattctcttccaaggtttgctgagacagcccaacctagcaacgcgtaatccagtttccgtgtttcccctttccgccgacgcccactgtgtgttgctgcctctttacgcgcgagatagttaacgatagcttcaccgtgggcataacgttgctgcccagtttgggtaaactttggcagaaaaatataccccatgccagtgagataaccggtcaggaaaacagcgctaaaataacccgctggcatataccagtaaaagaatacatctccgacattgatatagagagaataaaaggccacgcctgaacaaatcagcggtaaaaacaaagtgatgattacacgattaacgcaaggcttgtcatcatcgcgggcaaacaaaagctcaagggaacaaaataaaaaaggaagaagccagcagatcataataaacatatcgcccaccagactcattcctgcccagcctacaggactcaggttaccgtaaagaatgaccgccaatattgccagtccaccccattgcaaaaaagtatcaggccggtaaaacgaagactttttacgcggcagataaaatttctgcatccgtaaaacatctaccgacgtaaattgcggcctgcgcttccagagatataaccatccacaaaccagtaatagacacggaaaccaaattaacaacgatgacgtggagggtaaaagaagatggctgaaaatattcgtcgtttgtggagccggggcattgctaagtaacgagtgaggccaacggtagagtaccgtgaaatcttcacgataaaacggatcgctggattcaattcttccgtcctcaaggatgcggccatttcgatatgtgtcgccctcttctccagtaaagagatcgatttcgctaaatggattacccgcgatatcagggaacttgagtgaaaatcgggtcttatagatttcaaacggccagtggttaccagtcacgttccagattaacagatctgaatctccctcacgcaggaaagcatttttaacctgataatgaatttgataatgatagtcgccttgaggcaagaaacgttgtttatcgcccacgacaatactcattaacccgatatgccagtcaagatgccagggttcaggaataccatcacgggtgacgccaacaatatgatagttcagcagtgcagcgtccccatcaggctgcatccatagtcgtggtaaatcacgataaaatccgtgcttaatctgctgatttcgcgcctgaaaatgaatattttctttgatgtcgagcaccccatccggttgcagagtggcttcaacatcaaagagcgagatcccttcttcataagaaggcatctccgtgtttttcgcataacttaacgaagagaaaaaaagcccaactatcaacagcaaaatgcagcgaaacttccctgccatagtcttccatccgtggaacgcaatttgttataagaaaggcttcacatcacctacgccttcacgcaccacgaccggcgtatcatcggtaagatcaataaccgttgttggtttctgcccgagatagccgccgtgaataatcaaatcgacctgtttttccagacggtctttaatttcttcgggatcggattcggtaaattcgctgcctggcagcattagcgaagtggaaagcatcggttcgcccagtgcttcaagcaacgcctgcgcaatcgggttagaaggcacacgcataccgatggttttgcgtttttcctgcaacagacggcgtggcacctccttcgtccccttcaggatgaaggtatagttgcccggcgtgttgtttttcattaaacgaaacgcaacgttatcgacaaatgaataggtcgagagttcagaaagatcgcgacacatcagggtaaagttgtgaccgtccggcagctggcgaatacgacaaatacgctccatggcgtttttatcttcaattttacagccgagcgcatagccggaatcagttggataaacaatcaccccgcctttacgcacgatctccaccgcctggttgattagacgttgctgcgggttatcaggatgaatataaaaaaactggctcataattccctctctgtggtgttctgcggctgttcccatagctgccagacgccttcaacgcctgcgggcagccagagtttacgacccagttcgatccacgggcatggctgatgaaaatcagatccttgtgatgcccataaatggtgctggcgggcaagcgtcgccagctgggtacgttcattgggcgattgctggcactgcgcgacttccatcgcgtcgccgtcgtgttcggcaaaatgcgcaaccaatcttttcagccatttagcactaagattgtaccgcccaggatgagctagcaccgccttaccgccagaatgatgaatgacatcaatagcttgttctattgtacaccactgtggcggaacgtatccggttttcccgcgcgccagatactttttaaagacatccgccattgaactggctttgccgcactcaacaaggaaacgcgcaaaatgaccgcgcgtcactgcgccgccctgcgccagtcgttgtgcgccttccagcgccccaggtatatgcgctttttcaagtctttcggcaatttgctgngcccgctgattgcgccgttctgtctgctgcgcgaggaactcacacattagcggatgagtaatatcaatattcagcccgacaatatgaatttcatgattttcccagaccgnnnnnntttccacgccgggaataagattcagcgccagtcccgaacgtgaaatttcctctcttgctggcgcgattgcagctgtggtgtcatggtcggtgatcgccagggtgccgacgcgcatctcgactgcacggtgcaccaatgcttctggcgtcaggcagccatcggaagctgtggtatggctgtgcaggtcgtaaatcactgcgtaattcgtgtcgctcaaggcgcactcccgttctggataatgttttttgcgccgacatcataacggttctggcaaatattctgaaatgagctgttgacaattaatcatcgaactagttaactagtacgcaagttcacgtaaaaagggtatcgacaatgaaagcaattttcgtactgaaaggttggtggcgcacttcctgaaacgggcagtgtattcaccatgcgtaaagcaatcagatacccagcccgcctaatgagcgggcttnnnnnngaacaaaattagagaataacaatgcaaacacaaaaaccgactctcgaactgctaacctgcgaaggcgcttatcgcgacaatcccaccgcgctttttcaccaattgtgtgggaatcgtccggcaacgctgctgctggaatccgcagatatcgacagcaaagatgatttaaaaagcctgctgctggtagacagtgcgctgcgcattacagctttaggtgacactgtcacaatccagtccctttccggcaacggcgaagccctgctgacactactggataacgccctgcctgcgggtgtggaaaatgaacaattaccaaactgccntgtgctgcgcttcccccctgttagtccactgctggatgaagacgctcgcttatgctccctttcggtttttgacgctttccgcttattgcagaatctgttgaatgtaccgaaggaagaacgagaagccatgttcttcggcggcctgttctcttatgaccttgtggcggggtttgaagatttaccgcaactgtcagcggaaaataactgccctgatttctgtttttatctcgctgaaactctgatggtgattgaccatcagaaaaaaagcacccgcattcaggccagcctgtttgctccgaatgaagaagaaaaacaacgtctcactgctcgcctgaacgatcttcgccagcaactgaccgaaaccgcgccaccgctgccggtggtttccgtgccgcatatgcgttgtgaatgtaaccagagcgatgaagagttcggtggcgtagtgcgtttgttgcaaaaagcgattcgcgccggagaaattttccaggtggtgccatctcgccgtttctctctgccctgcccgtcaccgctggcggcctattacgtgctgaaaaagagtaatcccagcccgtacatgttttttatgcaggataatgatttcaccctgtttggcgcgtcgccggaaagttcgctcaagtatgacgccaccagccgccagattgagatctacccgattgccggaacacgtccacgcggtcgtcgcgccgatggctcgctcgacagggaccttgaaagccgtattgaactggaaatgcgtaccgatcataaagagctttctgaacatctgatgttggtggatctcgcccgtaatgacctggcacgcatttgcacccccggcagccgctacgtcgccgacctcaccaaagttgaccgttactcttacgtgatgcacctggtctcccgcgtggtcggtgagctgcgccacgatctcgacgccctgcacgcttaccgcgcctgtatgaataatggggacgttaagcggtgcnccgaaagtacgcgctatgcagttaattgccgaggctgaaggtcgtcgccnnnncagctacggcggcgcggtaggttatttcaccgcgcacggcgatctcgacacctgcattgtgatccgctcggcgctggtggaaaacggtatcgctaccgtgcaagccggtgctggcgtagtccttgattctgttccgcagtcggaagccgacgaaacccgtaataaagcccgcgctgtactgcgcgctattgccaccgcgcatcatgcacaggagacgttctaatggctgacattctgctgctcgataatatcgactcttttacttacaacctggcagatcagttgcgcagcaatggtcataacgtggtgatttaccgcaaccatattccggcgcagaccttaattgaacgccttgcgacgatgagcaatccggtgctgatgctttctcctggacccggtgtgccgagcgaagctggttgtatgcctgaactgcttacccgcctgcgcggtaagctgcctattattggcatttgccttggtcatcaggcgattgtcgaagcttacgggggctatgtcggtcaggcgggcgaaattcttcacggtaaagcgtcgagcattgaacatgacggtcaggcgatgtttgccggattaacaaacccgctgccggtggcgcgttatcactcgctggttggcagtaatattccggccggtttaaccatcaacgcccattttaatggcatggtgatggcggtgcgtcacgatgcagatcgcgtttgcggattccagttccacccggaatccattctcaccacccagggcgctcgcctgctggaacaaacgctggcctgggcgcagcagaaactagagccaaccaacacgctgcaaccgattctggaaaaactgtatcaggcgcagacccttagccagcaggaaagtcatcagctattttcagcggtggtacgtggtgaactgaaaccggaacacctggcggcggcgctggtgagcatgaaaattcgcggcgagcacccgaacgagatcgccggagcagcaaccgcgctactggaaaacgccgcgccgttcccgcgtccggattatctgtttgccgatatcgtcggcaccggcggtgacggcagcaacagcatcaatatttccaccgccagtgcgtttgtcgccgcggcctgtgggctgaaagtggcgaaacacggcaaccgtagcgtctccagtaaatctggctcgtcggatctgctggcggcgttcggtattaatcttgatatgaacgccgataaatcgcgccaggcgctggatgagttaggtgtatgtttcctctttgcaccgaaatatcacaccggatttcgccatgcaatgccggttcgccagcaactaaaaacccgcaccctgttcaatgtgctggggccattgattaacccggcgcatccgccgctggcgttaattggtgtttatagtccggaactggtgctgccgattgccgaaaccttacgcgtgctggggtatcaacgcgcggcggtggtgcacagcggcgggatggatgaagtttcattacacgcgccgacaatcgttgccgagctgcatgacggcgaaattaagagctatcaattgaccgctgaagattttggcctgantccctaccaccaggagcaactggcaggcggaacaccggaagaaaaccgtgacattttaacacgcttgttacaaggtaaaggcgacgccgcccatgaagcagccgtcgcggcgaatgtcgccatgttaatgcgcctgcatggccatgaagatctgcaagccaatgcgcaaaccgttcttgaggtactgcgcagtggttccgcttacgacagagtcaccgcactggcggcacgagggtaaatgatgcaaaccgttttagcgaaaatcgtcgcagacaaggcgatttgggtagaagcccgcaaacagcagcaaccgctggccagttttcagaatgaggttcagccgagcacgcgacatttttatgatgcgctacagggtgcgngcacggcgtttattctggagtgcaagaaagcgtcgccgtcaaaaggcgtgatctgtgatgatttcgatccagcacgcattgccgccatttataaacattacgcttcggcaatttcggtgctgactgatgagaaatattttcaggggagctttgatttcctccccatcgtcagccaaatcgccccgcagccgattttatgtaaagacttcattatcgacccttaccagatctatctggcgcgctattaccaggccgatgcctgcttattaatgctttcagtactggatgacgaacaatatcgccagcttgccgccgtcgcccacagtctgaagatgggtgtgctgaccgaagtcagtaatgaagaggaactggagcgcgccattgcattgggggcaaaggtcgttggcatcaacaaccgcgatctgcgtgatttgtcgattgatctcaaccgtacccgcgagcttgcgccgaaactggggcacaacgtgacggtaatcagcgaatcaggcatcaatacttacgctcaggtgcgcgagttaagccacttcgctgacggttttctaattggttcggcgttgatggcccatgacgatttgcacgccgccgtgcgtcgggtgttgctgggtgagaataaagtatgtggcctgacgcgtgggcaagatgctaaagcagcgtacgacgcgggcgcgatttacggtgggttgatntttgttgcgacatcaccgcgttgcgtcaacgttgaacaggcgcaggaagtgatggctgcggcaccgttgcagtatgttggcgtgttccgcaatcacgatattgccgatgtgctggacaaagctaaggtgttatcactggtggcagtgcaactgcatggtaatgaagatcagctgtatatcgatacgctgcgtgaagctctgccagcacacgttgccatctggaaagcattaagcgtcggtgaaaccctgcccgcccgcgagcttcagcacgttgataaatatgttttagacaacggccagggtggaagcgggcaacgtttcgactggtcactattaaatggtcaatcgcttggcaacgttctgctggcggggggcttaggcgcagataactgcgtggaagcggcacaaaccggctgcgccggacttgattttaattctgctgtagagtcgcaaccgggcatcaaagacgcacgtcttttggcctcggttttccagacgctgcgcgcatattaaggaaaggaacaatgacaacattacttaacccctattttggtgagtttggcggcatgtacgtgccacaaatcctgatgcctgctctgcgccagctggaagaagcttttgtcagcgcgcaaaaagatcctgaatttcaggctcagttcaacgacctgctgaaaaactatgccgggcgtccaaccgcgctgaccaaatgccagaacattacggctggcacgaacaccacgctgtatctgaagcgcgaagatttgctgcacggcggcgcgcataaaactaaccaggtgctcggtcaggctttactggcgaagcggatgggtaaaaccgaaatcatcgccgaaaccggggccggtcagcatggcgtggcgtnggcccttgccagcgccctgctcggcctgaaatgccgtatttatatgggggccaaagacgttgaacgccagtcgcctaacgtttttcgtatgcgtttaatgggtgcggaagtgatcccggtgcatagcggttccgcgacgctgaaagatgcctgtaacgaggcgctgcgcgactggtccggcagttatgaaaccgcgcactatatgctgggcaccgcagctggcccacatccttatccgaccattgtccgtgagtttcagcggatgattggcgaagaaaccaaagcacagattctggaaagagaaggtcgcctgccggatgccgttatcgcctgtgttggcggcggttcgaatgccatcggcatgtttgcagatttcatcaacgaaaccaacgtcggcctgattggtgtggagcctggtggtcacggtatcgaaactggcgagcacggcgcaccgctaaaacatggtcgcgtgggtatctatttcggtatgaaagcgccgatgatgcaaaccgaagacgggcagattgaagaatcttactccatctccgccggactcgattttccgtccgtcggcccacaacacgcgtatcttaacagcactggacgcgctgattatgtgtcaattaccgatgatgaagcactggaagccttcaaaacgctgtgcctgcacgaagggattatcccggcgctggaatcctcccacgccctggcccatgcgctgaaaatgatgcgcgaaaacccggaaaaagagcagctactggtggttaacctttccggtcgcggcgataaagacatcttcaccgttcacgatattttgaaagcacgaggggaaatctgatggaacgctacgaatctctgtttgcccagttgaaggagcgcaaagaaggcgcattcgttcctttcgtcacgctcggtgatccgggcattgagcagtcgctgaaaattatcgatacgctaattgaagccggtgctgacgcgctggagttaggcatccccttctccgacccactggcagatggcccgacgattcaaaacgccacactgcgtgcctttgcggcaggtgtgcccccggcgcagtgctttgagatgctggcactcattcgccagaaacacccgaccattcccattggcctgctgatgtatgccaacctggtgtttaacaaaggcattgatgagttttatgcccagtgcgagaaagtcggcgtcgattcggtgctggttgccgatgtgccagttgaagagtccgcgcccttccgccaggccgcgttgcgtcataatgtcgcacctatcttcatctgcccgccaaatgccgatgacgacctgctgcgccagatagcctcttacggtcgtggttacacatatttgctgtcacgagcgggcgtgaccggcgcagaaaaccgcgccgcgttacccctcaatcatctggttgcgaagctgaaagagtacaacgctgcacctccattgcagggatttggtatttccgccccggatcaggtaaaagcagcgattgatgcaggagctgcgggcgcgatttctggttctgcgattgttaaaatcatcgagcaacatattaatgagccaaagaaaatgctggcggcactgaaagcttttgtacaaccgatgaaagcggcgacgcgcagttaatcccacagccgccagttccgctggcggcattttaactttctttaacgaagccggaaaaatcctaaattcatttaatatttatctttttaccgtttcgcttacccctgtcgaacgtcaacttacgtcatttttccgcccaacagtaatataatcaaacaatttaatcccgcaacataacaccagtaaaatcaataattttatctaagtcacttattccgcaggcaattgttaatatatcaagaacgttcgtcataatatattttcctactttcttctcgttacgcttaatttgactaatcctcattagcgactaattttaatgagtgtcgacacacaacactcatattaatgaaacaatgcaacgcaacgggagaaataacatggccgaacatcgtggtggttcaggaaatttcgccgaagaccgtgagaaggcatccgacgcaggccgtaaaggcggtcagcatagcggcggtaattttaaaaatgatccgcaacgcgcatctgaagcgggtaaaaaaggcggtcaacaaagcggtggtaataaatcaggaaaatcctgattcaccgttaattattaatatcagctgataaagataattgcatctgcgggccgtatggctcgcagngatttcactggagaaaaatatgaatatgaagaccattgaagatgtatttattcacctgctttcagatacctacagcgcagaaaaacaattaacccgggcactggcaaaactcgcaagagcaacatcaaacgaaaaattaagtcaggcttttcatgcgcacctcgaggaaacacatggacagattgaacgtattgatcaagttgtggaatcagaatcgaatctgaaaattaagcgcatgaaatgtgtggcaatggaaggtcttattgaagaagctaatgaggtcatcgaaagtaccgagaaaaacgaagtgcgtgatgccgcactgattgccgcagcacagaaagtcgagcattatgagattgccagttacgggacattagcgacgctggctgaacaattaggttaccgtaaagcagcgaagcttctgaaagagaccctggaagaagaaaaggccaccgacatcaaactgactgatctggcccttaataacgtaaataagaaagccgaaaataaagcctgaaatatgaactttaacttttagtcattttataaagaggacattttcatgaatcgtattgaacattatcatgactggttacgtgacgcccatgcaatggaaaagcaagccgaatctatgcttgaatccatggccagccgtatagataattatcctgaactacgtgctcgtattgaacaacatcttagtgaaaccaaaaaccagattgttcaactggaaactattcttgattgtaatgacatttcacgttcagtcattaaagattccatgagtaaaatggctgcgcttgggcagtcaatcggtggtatattcccttctgatgaaatagtcaaaggctctattagcggatatgtcttcgagcaatttgaaatcgcctgttacacctctctattagcagcagcaaaaaatgccggtgatacagcctcaattccgatcatcgaagcgattttaaatgaggaaaagcaaatggccgactggctgattcagcatattccgcaaacaactgagaaatttttaattcgctctgaaactgatggcgtagaagcgaagaaataataccctttatgccatgtccttattgaccccgtatattacggggtcgtttttgtgcggaattaaaaacgatatcctgctgagaacataaacacccacggatcgaggcgtacgctatcatgttgctgtgcaccgcccagtttataattggcggtggtatcgatatccatgtaccacactggtagattttacaaaactcaataacatattannnnnnnnnnnnnnnnnnnnnnnnnnnnnnnnnnnnnnnntttacgatgcttttttatacagatctctcgtgtttttaactgattgattttgttgaactctttttttgttttgcaggagttactcctcttaccttattgtccactcgatgaccaacacattcacaacccaaaccagaatatcctatctatgaagcatgtatccgcacgcagattaactatggtttacattgttctaccacaatagtcgcatcctaaatgggtgcggttgaggatcaccatccttgaagaggatgcccgccactttaactgcatgacagggctatttaaacaatcactaaaaatcgcccaagagcattctgtttctataatgtattccaagagattaaaaaataatatcatacgttattcggcagagttcgtatgtactacggcgtcccaaccatgtcccaaaacaaaaatttcnnnnctatacacgttccaaaaaattccacaacaaagagagtctgctgacgagttgttgattcactgattaatacgtaaaattgataactgctggaaatcatacaatactcgtactttcgaaagttcgctaaccaggtgctacacgcgaggtgttgcagttttctttacgatttatcattcaatcctaatccatgcatgacatgtggtgcctgtggggtgatcctacctacgtaatgtggacacagccctaatcaaggttctgtttttcaaaacagttccgtgctgagacagccacaagtactgtgtcggcaccaccgattgtaatcacactagatctaattaaacacagccgtctgcattatttcccgactcataaaatattagccgtaaatgcattcgacttttagtgagtggaagaaactttccgccctagcattatcgtaacactaaaaattgtatcttagactcaacaacatgcaatgtagatggctttacagtgtttaacagaagatcctgtagttttgatatgcgtcctcccggaagcgcagacagaactccacaactgagattatcaatatcagaagtcgcatggatgtcaaaaataatagagacagagacaaataatacaaacaaatcatagctattagcccagaaaagagttggtacactagccatgaataacttcctaacaacttgattttttagttatttttttcttcattcttgaaaaaggatgccccgaaagggttccagagttcgattttctgcgcttctgcaaataatcaaggggttacaaagtggttgcccctttgtttttagtgctcttggtatacccattggtacatttagcgcaataccatctggtatcacttaaagacacgaaaaacaactttttatctttttgtttcgctcaaattagtataaaaagctgaacaacaaacaataaaaaccattaacatcaatagattatgatggcttcaatctaaataataggctatataatactgcaagacacaacacatgctgtcactatgagtcaactatttagatgatattagtgacctgtttcagagcattagcgcaaggcgattctttgtcttcttgcactaattttttgtcataaaaatgttcctagcactgggcatcaatatcgcaggtcagaaagagctcctggggatgcggctggccgaaaatgaaggggcgaatttctggttcaatgtgctgactgaactgaaaaaccgcggtctgaacgatatcctcatcgcctgtgtggatggcctgaaagaattcccggaggcccgcatccagttatgcatcgtgcatatggtgcgcaacagcatgcgcttcgtgtcatggaaggaatacaaagccgtcactcgcgacctgaaagcgattagcctcccacagaagaggcaggccagcaggcactggaagcgtttgctgcggcctgggactgccgctatccgcagataagccggtgctagctgtcaaactggactaacttggcgacgtttttcgcttatccggcagatatccgcaaagtgatctacacaacgaacgccgtcgagtcgctgaacagtgtgatccggcatgccatcaggaaacgcaaggtgttcccgacggacgagtcagtaaaaaaagtggtgtggctggcaatccaggccgcgtcacagaaatggacaatgccgttaagggactggcgaatggcaatgagccgctttattatcgagtttggtgaccgtcttgacggtcacttttaagaaaaggcatttacacagaatcctaaacaggctcacaggcctctaatcatccacattgtaaagatcctttgttgtaagtaagatctggtaccctaataatatcaaaaggattaaaatcatcactgcatccttccacgaggcatttcattgctcgtagatcaccatatagctctgaagagtgatgcggacatagcagattataaactttacatttcgaatcttctttgccttgtctactttcctcaatttttactttcaatgaatgcagaaaaaaaagatccctgatataactatccctatcctctatcgtcattcccgccctcagcgctccgacactcatcagtattttcatttctcacctcaaatacactatttctcttatccatcagcccacttacaaaagcacttagctcttgaaaaatttcctcaagctcattattatttctggcacatgaatatatagagaccataacatcaagtttatcttgtaattcaggagaaagaaagtgattatgattaagctcacttactgattccggagtcgaagggttacctcttcctgatacatacatccatgaataaagatttgctgaagaaccacttgttggtaacatatcaaaacccccttaacaaataaatccataaatnntattgcaactaatatatctggatnaaaatattatatcttacttaatactacactaataagatccagctttcctccgtgataagattgcatgacttgatgttcactccatgaaatatcagaaacattataagatgatatatctattggattaaattcatttctcatacgatcatataaaacatttgtctctgttgtatcaacaaaaagaattccttttttctccagtctgtcaaacatatcgtaaatagcctgttcagcttgtgctggtaatgatggaatatccaaaagagattccccatttattttattcattctaataccaataacatttccattatcattatatattttctctgcactcccggaaccataatactgattgaaacaacgaacttcgcttgtcacctcttcatggctttgagatatagtaaacatcttcaacacttttgttgtatcttccatatcttcatacacgacagcattaccacctttaccaataacattacctggcacgggtgatttattgttgctaaccctcggcaactctgactgagtataatccgctggaggtaactccggctgcgcataatccactggaggtaaatcaggtctgttcgaatgaacagagcctctttctatagtcgtgctcactggcgatgtattcagcatagcctcaatttttctgctaatctctcccttaggccatcccaacctgtgcaacagattagtaaaacaaccactatgactttctcttgtaacgcaaaacttattatcagtgaccacaacacgatatgttctgttgccaaccgttacttgcgtcccgctatcagagtgaacagcagcatcccttacagaggataaaacacgattatcaggcgaagtcaggtttctggttaaagaattccannaacnncccaaannnnnnnnnnnnnnnnnnaacatacatttcaaccttcaaaataaacttatctaattattcctaacagacatcccccgtacatgacaacaaaaaccggagccggactccggtttttgtgaagctatcgggttacttcatttcgccaatattttcccacttcccgtcagcacgcaggatttgcagcggtcttactacacactgacccgaggacgaaaaaagagttcgggctgggaagagacagaagagtagcaatttcagaagcattcacaccaacattgagcttttcagcgaaagtgggcacgaatcattgctggacagggttaaaggcactgactcaatcactcttcatacgtggcttgattgatatgaaacaatcctcagctagagggggagcaagccgaaaacattactcgactacgccagcaaaatcagggtaattcgaagaaaattgccggacaaaccgctcactgacatatcaacgaaagaggtggcagcaatgctaaacacctacgtcgcagaaggtaaagcggtttccgcaagagtaatcaggtcaacccttgttgacgtttttcgaggggcaatagccgaggggcatgtggcaacgaatccagtaacaacaacccgtgcagcaaagtcagaagtaaggcgctcaaggctgacagctaatgagtatgtcgctatttaccatgctgctgancacctccccatctggctgaggctgkcaatggatttagctgtmgttacaggncagagagtggncgatttgtgcagaatgaagtggtcagacataaacgatggtcatcttcacattggacagagtaaaacaggagccaaaattgccattccgctggctctaaccattgacgcactcgacatctcactggttgatacactacagaaatgcagggaggccagcagcagtgaaacaataatcgcatcracctatcacgaaccactttctcnagccacagtatcacggtatttaacaaaggcgcgaaatgcatccgggatctcgtttgatggagacccaccgacatttcatgaactacgtagtctgtccgcgaggctatatcggaaccagattggctacaagtttgcacaacgtcttcttggacataaatctgattcaatggcngcgcattatagggacagtcgcgagcgggagtgggacaaaattgaaatcggataatgattttattttgaccaataatgacttaccagatttaacaacttgatatttaataagatnnntgaacgaacaacttccatgtcagaaggnnnnnnaaatnacaaaaatacattaaaaatcattatgtnnnnnnnnnnnnnnnnnnnnnnnnnnnnnnnnnnnnnnnnaaaacgcgacaaaacactacatttagagtcacaattaatcaatgagttaggtgtgattagtgacctgagacagagcattagcgcaaggtgatnnnnnnnnnnnnnnnnnnnnnnnnnnnnnnnnnnnnnnnnnnnnnnnnntttttgtcatcaaacatacagccaatcagaagagcataaagctgccaagcattatatgtcttagttttatgctcattttcattnnnnnnnnnnnnnnnnnnnnnnnnnnnnnnnnnnnnnnnnnaacacttagagtaaaaatgtaatnnnnnnatacaaccaacnnnnnnnnnnnnnnnnnnnnnnnnnnnnnnnnnnnnnnnngtgttcaagcgataaactggtaaatttaacaacttaattttgagatctaagtcacatcaatcaagcattcaaacagctatatattaaanctgtccacatcggatatgtgacactaataatatcaatggattgatattattaatggatataaacatgcaataaggatttatcatgaacattcaacnnnnnnnnnnnnnnnnnnnnnnnnnnnnnnnnnnnnnnnnatcaccacacaaaacaatcaacatcatnnnnnngaacannnnncccctacacaaataccgcaatccgaattacnnnnnnnnnnnnnnnnnnnnnnnnnnnnnnnnnnnnnnnnnnnnnnnnnnnnnnnnnnnnnnnatatgcagcnacatgcaccggaatgcggtgaaacaacagctctactgagcttgataaaagatgaaggtctgctnnnnnnnnnnnnnnnnnnnnnnnnnnnnnnnnnnnnnnnnnnnnnnngaaaaaaagcattggatatgtnnnnnnnnnnnnnnnnnnnnnnnnnnnnnnnnnnnnnnnnnnnnnnnnnnnnnnnnnnnnnnnnnnnnnnnnnnnnnnnnnnnnnnnnnnnnnnnnnnnnnnnnnnnnnnnnnnnnnnnnnnnnnnnnnnnnnnnnnnnnnnnnnnnnnnnnnnnnnnntaaccaccgagccaaaagacccannnnnnnnnnnnnnnnnnnnnnntcaagtagttcgtannnntggtgnnnnnnnnnnnnnnnnnnnnnnnnnaaatggatggaagcttgttggagaaannnnnnnnnnnnnnnnnnnnnnnnnnnnnnnnnnnnnnnnnggnncaaaagcaaattacacggaggagtgggttatcagaccgggagaagcagattttaaatatggtacatctccactacaggcaactctagggctggagtttggcgcacatttcaaatgggatttaganaacccnnatacnnaatatgccgttcttaccaatgctgccgcaaatgcgnnnnnnnnnnnnnnnnnnnnnnnnnnnnnnnnnnnnnnnnnnnnnnnatggttgggcanncagcagggcannnnatacagtgtaatacccccggatnnaagccagacactattttatggtgggnnnnnnnnnnnnnnnnnnnnnnnnnnnnnnnnnnnnnnnnttcactgactatcctcgtatatggtggcatgcaagagnannnnnnnnnnnnnnnnnnnnnnnnnnnnnnnnnnnnnnntatcgaaagcaatgacttaccacatcataatccattaaatcatgttgatatcgttgatataatccaagaaacaagagtctaagctttnnnnnnnnnnnnnnnnnnnnnnnnnnnnnnnnnnnnnnnnnnnnnnnnnnnacgccctcaagtcatctgaaacctgtcaaccacagacaccttcttatatnnnnnnnnnnnnnnnnnnnnnnnnnnnnnnnnnnnnnnnnnnnnnnnnnnnnnnnnnnnnnnnnnnnnnnnnnnnnnnnnnnnnnnnnnnnnnnnnnnnnnnnnnnnnnnnnnnnnnnnnnnnnnnnnnnnnnnnnnnnnnnnnnnntgaatactctcttgcgattgtgnnnnnnnnnnnnnnnnnnnnnnnnnnnnnnnnnnnnnnnnnnnnnnnnnnnnnnnnnnnnccctgttttaattcnaactccagacnnnnnnnnnnnnnnnnnnnnnnnnncttacatgacaacaaaaaccggagccgnnnnnnnnnnnnnnnnnnnnnnnnnnnnnnnnnnnnnnnnntcgggttacttcatcccgccaatannnncccacgtcccgtcagcacgcannnnnnnnnnnnnnnnnnnnnnnnnnnnnnnnnnnnnnnnggtcttaccacncactgtatctgctttttatccgcatccagtatcaccacctgcgtgattaccctgncctgctccggaataatnccattctcatcngactccagnatgtctgccggccccagwcgcagytgtgctgtaagtaactccccgtnttcacggtcatcatgctttccgtacccgcacagacgctgcataanttttnnnnnnnnnnnnnnnnnnnnnnnnnnnnnnnnnnnnnnnnnnnnnnnnnnnnnnnnnnnnnnnnnnnnagccccttaacatcctgccacggcccgtcaccaaacctgacctgcaaatgctgaaaaaaaccctnnacnngtgtgnnnnnnnnnnnnnnnnnnnnnnnnnnnnnnnnnnnnnnnnnnnnnnnnnnnnnnnnnnnnnnnnnnnnnnnnnnnctgtttgtctcaataatgnnnnncggcccnnnnnnnnnnnnnnnnnnnnnnncccccgggtcgcccttcggtccctgaggnnnnnnnnnnnnnnnnnnnnnnnnnnnnnnnnnnnnnnnnnnnnnnnnnnnnnnnnnnnnnnnnnnnnnnnnnnnnnnnnnnnnnnnnnnnnnnnnctctccccgctctcccctgtnnnnnnnnnnnnnnnnnnnnnnnnnnnnnnnnnnnnnnnnnnnnnnnnnnnnnnnnnnnnnnnnnnnnnnnnnnncccctttggcccgggannnnccaccacggtggggattcggtttacggcctcttccgccgctatcctgctttgttccgctgactgtgcgctttctgctgactcccgggctttttctnnngcggtcgttgcatccctggctgcattaccggctgcactttctgccgtctttnttgacaactcagcatctgntgcactttgtgatgactcactggctttttnnnnnnnnnnnnnnnnnnnnnnnnnnnnnnnnnnnnnnnnngcntcccctgctgaagtgtcagcatttgcagcgctctcttctgcctgactggctgannnnnnnnnnnnnnnnnnnnnnnnnnnnnnnnnnnnnnnnnnnnnnnnnnnnncattcagcgtaccgggttgagaatcttcatacacggtgatggtccnnnnnnnnnnnnnnnnnnnnnnnnnnannnncagaatgacgctgtactgaccgtactcaacntnnnnnnnnnnnnnnnnnnnnnnnnnnnnnnnnnnnnnnnnnnnnnnnngccaccgtgttcaccaccaccgtnnnnnnnnnnnnnnnnnnnnnnnnnnnnnnnnnnnnnnnnnnnnnnnnnnnnnnnnnnnnnnnnnnnnnnnnnnnnnnnnnnnnnncttgttgtcagttacgnngagannnnnnnnnnnnnnnnnnnnnnnnnnnnnnnnnnnnnnnnnnnnnnnnnnnnnnnnnnnnngaaccagcggttacgnacggaatnnnnnnnnnnnnnnnnnnnnnnnnnnnnnnnnnnnnnnnnnnnnnnnnnnnnnnnnnnnnncataacggtatttcacgttaatcnnnnnnnnnnnnnnnnnnncgggnncgttcgtcgaggcatgaagataccccgnnctnnnnnnnnnnnnnnnnnnnnnnnnnnnnnnnnnnnnnnnnnnnnnnnnnnnnnnnnnnnnnnnnnnnnnnnnnnnnnnnnnnnnnnnnnnnnnnnnnnnnnnnnnnnnnnnnnnnnnnnnnnnnnnnnnnnnnnnnnnnnnnnnnnnnnnnnnnnnnnnnnnnnnnnnnnnnnnnnnnnnnnnnnnnnnnnnnnnnnnnnnnnnnnnnnnnnnnnnnnnngcaggcatatcaataacaccactgtannnnnncgtattatccagcgcggtacggttananntttcagcaccgtttttccgcactatcagacggcatgaggagtaaatatcagtnnnnnnnnnnnnnnnnnnnnnnnnnnnnnnnnnnnnnnnnnnnnnnnnnnnnnnnnnnnnnnnnnnnnnnnnnnnnnnnnnnnnnnnnnnnnnnnnnnnnnnnnnnnnnnnnnnnnnnnnnnnnnnnnnnnnnnnnnnnnnnnnnnnnnnnnnnnnnnnnnnnnnnnnnnnnnnnnnnnnnnnnnnnnnnnnnnnnnnnnnnnnnnnnnnnnngacgttgttgagcgtcccggagtnnnnnnnnnnnnnnnnnnnnnnnnnnnnnnnnnnnnnnnnnnnnnnnnnnnnnnnnnnnnnnnnnnnnnnnntcagggaaaatgccggaggattanngccgctggtaatggtgggagccgtcagatatnnnnnnnnnnnnnnnnnnnnnnnnnnnnnnnnnnnnnnnnnnnnnnnnnnnnnnnnnnnnnnnnnnnnnnnnnnnttaatcatcgcnntcctgtctgccgccagnngcaccnnnnnnnnnnnnnnnnnnnnnnnnnnnnnnnnnnnnnnnnnnnnnnnnnnnnnnnnnnnnnnnnnnnnnnnnnnnnnnnnnnnnnnnnnnnnnnnnnnnnnnnnnnnnngtatcaacctgaaccttctgtannnnnnnnnnnnnnnnnnnnnnnnnnnnnnnnnnnnnnnnnnnngaaaaaatccaggtaaccttcngcatcatcgctcgcccgaccgacggnnnnnnnnnnnnnnnnnnnnnnnnnnnnnnnnnnnnnnnnnnnnnnnnnnnnnnnnnnnnnnnnnnnnnnnnnnnnnnnggtttgatattgatactggcnnnnnnnnnnnnnnnnnnnnnnnnnnnnnnnnnnnnnnnnnnnnnnnnnnnnnnnnnnnctgcctgatatccgcaatccgcgtttccgagaaccagaactcaannnnnnnnnnnnnnnnnnnnnnnnnnnnnnnnnnnnnnnnnnnnnnnnnnnnnnnnnnnnnnnnnnnnnnnnnnnnnnnnnnnnnnnnnnnnnnnnnnnnnnnnnnnnnnnnnnnnnnnnnnnnnnnnnnnnnnnnnnnnnnnnnnnnnnnnnnnnnnnnnnnnnnnnnnnnnnnnnnnnnnnnnnnnnnnnnnnnnnnnnnnnnnnnnnnnnnnnnnnnnnnnnnnnnnnnnnnnnnnnnnnnnnnnnnnnnnnnnnnnnnnnnnnnnnnnnnnnnnnnnnnnnnnnnnnnnnnnnnnnnnnnnnnnnnnnnnnnnnnnnnnnnnnnnnnnnnnnnnnnnnnnnnnnnnnnnnnnnnnnnnnnnnnnnnnnnnnnnnnnnnnnnnnnnnnnnnnnnnnnnnnnnnnnnnnnnnnnnnnnnnnnnnnnnnnnnnnnnnnnnnnnnnnnnnnnnnnnnnnnnnnnnnnnnnnnnnnnnnnnnnnnnnnnnnnnnnnnnnnnnnnnnnnnnnnnnnnnnnnnnnnnnnnnnnnnnnnnnnnnnnnnnnnnnnnnnnnnnnnnnnnnnnnnnnnnnnnnnnnnnnnnnnnnnnnnnnnnnnnnnnnnnnnnnnnnnnnnnnnnnnnnnnnnnnnnnnnnnnnnnnnnnnnnnnnnnnnnnnnnnnnnnnnnnnnnnnnnnnnnnnnnnnnnnnnnnnnnnnnnnnnnnnnnnnnnnnnnnnnnnnnnnnnnnnnnnnnnnnnnnnnnnnnnnnnnnnnnnnnnnnnnnnnnnnnnnnnnnnnnnnnnnnnnnnnnnnnnnnnnnnnnnnnnnnnnnnnnnnnnnnnnnngcacaaacgtcagcgtctgcccgttccataccgnnatacnnnnnnnnnnnnnnnnnnnnnnnnnnnnnnnnnnnnnnnnnnnnnnnnnnnnnnnnnnnnacgcattgaaagtcatccgcgnntctnngcncccganaccatccggnnnnnnnnnnnnnnnnnnnnnnnnnnnnnnnnnnnnnnnnnnnnnnnnnnnnnnnnnnnnnnnnnnnnnaattttttttaatatgttcatgtcattctcctgttctgcctgtatcactgcccacttcatccagccccttaacatcctgccacggcccgtcaccaaacctgacctgcaaatgctgaaaaaaaccctgaacccgtgtggcatctttgggggcaagaaaggtcagtccggtgatgagtgcgccatctgtatccgggaaccagccattgctgtttgtctcaataatgtttcccggccccagacggaaccgtatttgtgtctctccccgctctcccctgtcacctttcggcccctgcgggcctgccggnncagcatcacctgccggtccccgttcgccggttgccccgacagggccggtgtcaccgcgctctcccttatcacccttcgncccctgaggacccnnngnnnnccnnttccccctttggcccgggaggtcccaccacggtgggggattcggtttacggcctcttccgccgctatcctgctttgttccgctgactgtgcgctttctgctgactcccgggctttttctgttgcggtcgttgcatccctggctgcattaccggctgcactttctgccgtctttcttgacaantcagcatctgctgcactttgtgatgactcactggctttttgagcagccgcagaggccgaggacgaggacgcctcctctgactgctttgcagcggctgcactttctgccgcctgccgggctgactccgatgcatcccctgctgaagtgtcagcatttgcagcgctctcttctgcctgactggctgatatgccggcattcctcgcggacgtctccgcctctccggcattcttcttcgcctcctcagcgtgacgcgccgcttcttccaccatcagttcaaaacgacgcagngcctccggccggacgtcatcctccgacatggcaccgagaaaatcattcagcgtaccgggttgagaatcttcatacacggtgatggtcccggcatgtgacggcgggaatccttccaccaacagaatgacgctgtactgaccgtactcaacgtccatgctgtaacgaccggcttcatccggattttcagaggccaccgtgttcaccaccaccgtgctgctggtccgtctggctttcagttgaatggtgcagttctgtaccggttttcctgtgccgtctttcagtacacctgaaatctttactgccatattcaccccacaaaaacgcccaccagaaccggcgggctgtcataactctgtgttacctggctaatcagaatttataaccgacccccacaatgaaaccgtcagtgcgccagtcgccactgccggagccttcataagcaaggtcaataaccaccgtctctacgggactgaactgaatcccggcattccaggccggcgacagatgacgcgcagtatgaccatcactggcggtggtggtctccttcacataccccggtttcacttcatcacgccggtaatcctgaacactgtcagaccagcgggtgtacgccatcccggccatgccatagagactgacccgctcactgagctgccagacagggccnnncatcagactgacataacgaccgcgcaggctttcataatggaaggtattttcacccgtcttcatcgtgtcacttttcttcaccgatgcataactcagcgcgacaatgccgcccaggtgatccgtgaactcataacggtatttcacattaatcccttttaaatcacctgcacgcgcaccggtaccggacaatgccggtacgccgcccgggtgaacctgagcatatcccacggaaaatgcaccgtgtccgctttcagcctgtgcaggaagggaaatgcctgtcagcagtgcggtccagaataaaatggctccgtataaatgtcgtgtagtggcacagtaaatttgnncacctgnnnnnnnntgatatcctcaccacaacacaaaacaggtgacttaatgaacaagaaaaccaaacgtactttcacccctgaattcaggctggaatgtgcacagctaattgttgataagggctactcatatcgacaagccagtgaagcgatgaatgtcggttctaccacgcttgagagttgggtgcgccagctcaggcgagagcgtcaggggattgcgccctctgccacacctattactccagaccagcaacgtatccgcgaactggaaaagcaggttcgccgcctggaggaacacaatacgatattaaaaaaggctaccgcgctcttgatgtccgactcgctgaacggttcacgatagttgccagactgagtgacagccactcagttgtcagcctctgttctgctctggaaatacaccgcagcagttaccagtactggcgaaaacgacgcgatacggttaatccggcgcgagtcaggttgtgcagcgaaatacgccgggcgtggaaccaaagtaggggctctgcgggggcgcgcacgctggctgaaatgctgacccaaaacggcgtcccgatgagccgttaccgtgccgggcgtctgatgaaatatctgaacctgagcagttgtcagcccggaaaacatcagtacaaaaatgctcgtcaggaacatacctgcctgccgaatctgcttgagcgccagttcgctgtgcccgagccagatagggtatggtgcggagatattacgtatatctgggcaggaaatcgctggtgctatctggcggtcgtcatggatctttttgcccgcagggttatcggctggagcctgtcagcgaatgccgatactgccctgataagcagtgccctgcggatggcgtatgaggtgcgtggtcagccgcgggacgtcatgttccatagcgaccagggaagtcaatatacaggactgaaatatcaacaacttctctggcgttacaggataaagcaaagtgtcagccgacggggaaactgctgggataacagtccaatggaacgcttcttccgcagtctgaaaacagaatgggtgccaaccgatggctacacaggcaaagacgtggcccggcagcaaatcagcagttatattctgaattattacaatagcgtcaggcctcaccattataacggagggctgacgccggaagagtcagagaacagatatcatttttactgtaaaaccgtggccagtattacttgaccactacatcgcatgatgacctctcgttttcagtcaataaaaaaggcacctcctgaggtgcccgtccgggttaataaaccgtcagctgatactgatccctgctgtggattttttcatgaccacaaccagtaaatcactgatgtacgttgtcggcgtccagttgttcgcaccggccgacgacacattaaacgtcagggtgacatgaccccgccctgccggcatatctatcaccgatgagaacacccggctgacatccgttgccggttcatggaaaatctcaaccccgttcttcagcacctgcagcttacaggtggaataccagtacgactgctgattcgggctgttgaaattctggtgtttcgtcccgcgaaacagcaccgggggaatgatgatctgccggtcgaagccctggtcatcgtaaactgtgacggttaccgtcccgctggcataactgttattccgggnnaagnntttccccaccgtcttcaccaggtcgccttcaatctggtttgcagacagtttccctctgatgacacagttctcgttaatggtgacattattgagcgtgccggtattcgcggtaattgctccgctgatatccgcgttcctggctgtcagcttcccttccggcgtcagggaaaacgtcggggggttgccggatgacgtgatactcaccgcaaacaggcgtttcaggaacacgtcgttcatgaatatctgatcgccctgaccaacaaacatcggctttgtgttgccattcgcaggattaatcatcgcaatcctgtctgccgccagcagcacctgactctgcattcctgcnnnnnnnnnnnnnnnnnnnnnnnnnnnnnnnnnnnnnnnttctcaataccggcaccgatacccgcaatataaaggcgtccgtccttcatctgttgcagcttcacagcccacatgctgttcagattattatttgtatcaacctgaaccttctgtatctgctggatcgctgcactctggtcttccagtttcttattgacggtctgcgtgatttcattactgacatccgtgatggacgttctgatttccgccaggtcaggcgcaagctgaccgttatcaatctgagtccacaactcctgagccagatgggttttccctatctctcctttgaaaaaatccagatagccggatgcatcatcactcggctggccaacagcctccacaaatgccgatttgccaacggtgttcacactgcggatataaaagtaataatcatggcccggtttgatattgatactggcggctatccagtacagccccgtgccaaggtagcgggctgtggtttcaacctgcctgatatcggtaatccgcgtttccgaaaaccagaactcaaactgtaccgtcgggtcatacaccgcaagacgcgggaccgctgttatctgaaaatagcccggtgtcagctcaatcgtggcgggtaccgcaggtgcattaatcctgaacgtggtggtggccggttccccctgctggccataactgttaattgccctgactgtcagggtgtattccccgagcggcagaccactgaaacgatgctctgtatccgcagtgatggcggtggtcaccagacggctgtcctgaccgcttccactggtcaggcgcagactgaagcgcacgcccttcaccacccgcggcgtgtcccatttcgcctgcgccagatactggctgtcagctgcactcacctccaccgtcaggtgctgcactgccggtgggataacgctgttcagggtgcctgactgcggctcaaagctggccccgttatccacgatggcttctttctccggcacatgctgcactgccgtgatggcaaaggtaccgtccgtgttttcccggatggaaacacagcggaacaggcgacgacgcagtgacggcagggagagtccccatacaccgtatgtctccacaccatcaggcagggtgctgacctgtatccggtccggcgcggggtgtgcagtgatggccacgctcaccggcttaccgctgccgttaatcaggttcaccgtggcggcacctgtctccggcagggtcacctcacggtccagtgtcagggtgcggctggcggcatcgatggacaggatacgtccgccggtcatggtcccggcatagtcgttatcacagatttcaataatgtcaccgggtgtgtgacgcagcccctgtgacccgagcgtgaaatccaccgtctgcgtttccagcagtccggtctttatcacccacagcccggcacggtgggcctgaccgcgactggtgcaaccgaacgcatccatcttcagcaggttgcgcccgtagcgcagtatggcttccgggtcttccaccagttccgtggaggtctgccagccgttatgcgggtcggtgtaattcacctccaccgccgtgtggcggtccttcagggcgctgaagctgtagagaaaccccacgccgttatcatccaccaccacatcgcagttggtgtacggccacaccacatccgacgggcggtcctgaacgaacgtcagcgtctggccgttccataccggcatacagcgcatcgccgagcagaaatcactgagannnnnnnnnnnnnnnnnnnnnnnnnnnnnnnnnnnnnncgcacagacgctgcataagtttttttagtatgttcatgtcattctcctgttcnnnnnnnnnnactgcccacttcatccagccccttgacatcctgccacggcccgtcaccaaacctgacctgcaaatgctgaaaaaacccctgaacctgtgtggcatctttggggtcaagaaaggtcnntccggtgatgagcgcaccatctgtacccgggaaccagccattgctgtttgtctcaataatgctcgccggccccagacgaaaacggatnnnnnnnnnnnnnnnnnnnnnnnnnnnnnnnnnnnnnnnnnnnnnnnccaccgggccagccgcacctgtttctcctttcggtccctgtgggcctgccgggcctgccgcaccggtatctccctttgnnnnnnnnnnnnnnnnnnnnnnnnnnnnnnnnnnnnnnnnnngctctcccctgtcacctttcgnnnnnnnnnnnnnnnnnggaccagcatcacctgccggtccnnnnnnnnnnnnnnnnnnnnnnnnnnnnnnnnnnnnnnnnnnnnnnnnnnnnnnnnnnnnnnnnnnnnnnnnnnnnnnnnnnnnnnnnnnctttggcccgggaggtcccaccacggnnnnnnnnnnnnnnanngcctcttnngccgctatcctnnnnngttccgctgactgtgcgctttctgctgactnnnnggctttttctgnngcggtcgttgcannccnngnngcattaccggctgcactttctgccgtctttcttgacaattcagcttctgctgcactttgtgatgactnnnnnnnnnnnnnnnnnnnnnnnnnnnnnnnnnnnnnnnnngcatcctctgactgctttgctgaggctgcactttctgccgcctgccgggctgactccgatgcctcccctgctgaagtgtcagcatttnnnncnntctcttctgcctgactggctgatnnnnnggcattcctcgctgacgtctccgcctctccggcattcttcttcgcctcctcagcgtgacgcgccacctctnncaccatcagttnnnnnnnnnnnnnnnnnnnnnnnnnnnnnnnntcctccgacatggcaccgagaaaatcattcagcgtaccgggttgagaatcttcatacacggtgatggtcccggcatgtgacggcgggaatccttccaccaacagaatgacgctgtactgaccgtactcaacgtccatgctgtaacgaccggcttcnnnnnnnnnnnnnnnnnnnaccgtgttcaccaccaccgtgctgctggtccgtctggctttcagttgaatggtncagttctctaccggttttcctgtgccgtctttcannacaccnnnnnnnttnnnnncnntattcaccccnnnnnnnnnnnnnnnnnnnnnnnnnnnnnnnnnnnnnnnnnnnnnnnctggctaatcagaacttataaccgacacccacgatnnnnnnnnnnnnnnnnnnnnnnccactgccggagccttcataagcgacatcaacggccactgattcggtcgggttaaactgcnngnnagccccccacgnnnnnnnnnnnnnnnnnnnnnnnnnnnnnncacttccggtnngcacgtcgtgcgttttcctcttgttntcagttacgcgaagannatccccngagaaanncnnnnnnnnnnnnnnnnnnntacccgccatcgcatacgcgnngnnnnnnnnnnnnnnnnnnnnagacggccccgccatnncgcnnannnnnnnnnnnnnnnnnnnnnnnnnatgccagcggnnatcgctgtaacgngtcagctggcgattcttgtctcctgcatagctgaatgacgtcaccagccccagtgtgtccgtaaactcataacggtattnnnngttaatcccgttcagatcatcgctgccgggaacgttcgtcgaggcatgannataccccgcgcnnagcgtggactgatgttcagatgcccatgcaggcgcaccggatacagccagacaaatggcnnnnnnnnnnnnnnnnncannnngtttacgcataattacctctcgcttnnnnnnnnnnnnnnnnnnnnnnnnnnnggcgcccgtatatgggttataaaattcagctgatactgatgcctgctgtggattttttcatcaccacaaccagcagatcgctgatacttgctgtgggataccagttatttaccagccatgctgacaccgaaaactccagcgtcatgtgaccgtgaccggcaggcatatcaataacgccactgtaaatcagcgtattatccagcgcggtacggttataaatttcagcaccgtttttccgcactatcagacggcatgaggagtaaatatcagtatgctctctctcatgtttagcgcnnctgaatgccaccgccggaataacaatttgccggtcaaacggctgatcgtcataaaccctgacggtaatggtccctgatggccaccgctccggtgcacgggaatccnnnnnnnnnnctnngcccactgtttnnacgagatcgccttcaatctggttcgcggacanntttcccagaacccgacagttctcgttaatcgtgacgttgttgagcgtcccggaattcgcattcnngttaccgctgatatcagcatttcttgcggtcagactgccctccggcgtcanngnnnnnnnnnnnnnnnnnnnnnnnnnnnnnnnnnnnnnnncaaacagccgnntcaggaacacannnnnnnnnnnnaactgattnncctgcnncacaaatannnnnnnnnnnnnnnnnnnnnnnnnnnnnnnnnncaatacggtcagccagcagcagtatgttgctcaggggctggccatcagtatcctcaatccccgctccaataccggcaacatagggaatgccgtctttcgttttttgaaccttcagcatgtacagcgcagccaggtcatcatttgtnncnnnnnnnnnnngcnntatctgctgtatggtggcgctctnnnnnnnnnnnnnnnnnnnnnnnnnnnnnnnnnnnnnnnnnnnnnnttcggtgatggtggtcnncatctcnncnntctnntccgcaagctggctgttgtctatcagctcccacagcccctgagccagatgcagtttnnnnnnnnnnnnnnnnaaaaattccagatacccttcaccnnnnnnnnnnnnnngcccgctgatttccacaaacgcagattnnnnnnnnnnnnnnnnnnnnnnnnnnnnnnnnnnnnnnnnnnnnnnnnnnnnnnnnnnnnnnnnnnnnnnnnnnnnnnnnnnnnnnnnnnnnnnnnnnnnnnnnnnnntttnnacctgagatatgtctgcgnnnnnnnnnnnnganaaccagaactcaaactgtaccgtcgggtcatacaccgcaagacgcgggaccgctgttatctgnnnnnngcccggtgtcagctcaatctgtgacggcgctgccggtgcggcaatccggaacgataccgacgccggatcgccctgctgnccccacgcatttrccgcccggactgtcagcctgtagttccccngcgccagttgcgtgaagcggtatgtggtttccgtcgtccgggccgtgctgaccagccgctcactgccgtcatccgcgaccacggtcaggcgaagcataaagctcacgcccttcaccaccttcggcgtgtcccatttcgcctgtgccagatactgaccgtnnnnnnnnnnnacctccaccnncaggtgctgcactgccggtggrataacgctgttcagggtgcctgactgcggctcaaagctggccccgttatccacgatggcttcttnnnnnggtacgtgctgcaccgccgtgatggcaaaggtaccgtccgtgttttcccggatggaaacacagnggaacaggcgacgacgcagtgacggcagggagagtccccatacaccgtatgtctccacaccatcaggcagggtgctgacctgtatccggtccggcgnnnnnnnnnnnnnnnnnnnnnnnnnnnccggcttaccgctgccgttaatcaggttcaccgtggcggcacctgtctccggcagggtcacctcacggtccagtgtcagggtnnggctggcggcatcgatggacaggatacgtccgccggtcatggtcccggcatagtcgttatcacagatttcaataatgtcaccgggtgtgtgacgcagccnnnnnnnnnnnnncgtgnnntccaccgtctgcgtttnnnncagtccggtctttatcacccacagcccggcacggtgggcctgaccgcgactggtgcaaccgaacgcatccatcttcagcaggttgcgcccgtagcgcagtatggcttccgggtcttccaccagttccgtnnnnnnnnnnnnnnnnnnnngcgggtcggtgtaattcacctccaccgccgtgtggcggtccttcagggcgctgaagctgtagagaaaccccacgccgttatcatccaccaccacatcgcagttggtgtacggncacaccacatccgacgggcggtcctgaacgaacgtcagcgtctgsccgttccataccggcatacagcgcnnnnnnnnnnnnnnnnnnnnnnnnnnnnnnnnnnnnnnnnnnnnnnnnnnnnnnnnnnnnnnnnncccatkccgtagcgckggtgrgtcagcatgtcccacaggcaccannnnnnnnnnnnnnnnnnnnnnnnnnnnnnnnnnnnnnnnnnnnnngtatgccggtttcaggctgccgtcccagataccgctgtamgtgcgtttttccgggtcatagtttgacggtacctgnatgatgcgaccgcggatatggtagttcaccgnnnnnnnnnnnnnnnnnnnnnnnnnnnnnnnnnnnnnnnnnnnctgcagccccacaatcgccgtgttcgggtagcactgtttcacatcgatgatttcggtgtatgacgaccagagcgtcttattctgcagctggtccggggtgctgtccgctgtctcccggaccatccgnnnnnnnnnnnnnnnnnnnnnnnnnnnnnnnnnnnnnnnnnnnnnnnnnnnnnnnnnnnnnnnnnnnnaggtggtcttgccgttaatggtgacatccttttccgtcacccagttaccgttacgctgcaactgaatcagcagtcggacagaagagggattacggtcgccctttgaggtggtctccaacagtgactgcnnnnnnnnnnnnnnnnnnnnnnnnnnnnnnnnnnnnnnnnnnnnnnnnnnnnnnnnnnnnnnntcacttccacgcccagtncggtttcnnnnccggaggactcaaagccttcaggtggtgtctgctcctgctcnnnnnnnnnnnnnnnnnnnnnnnnnnnnnnnnnnnnnnnncaggattaccgtccgtgtccgtcannngggttttgttcaccagaatactctgcagtnncttcaccggaccttccnccgnncnnnnnnnnnnnnnnnnnnnnnnnnnnnnnnnnnnnnnnnnnnnnnnnnnnnnnnnnnnnnnnnnnnnnnnnnnnnnnnnnnnnnnnnnnnnnnnnnnnnnnncttcatcacgggtgctgatgtcctgnnnnnnnnnnnnnnnnnnnnnnnnnnnnnnnnnnnnnnnnnnnnnnnnnnnnncgnnaggcaccggcatcgggttcccctgngcaatcatgttatccagcgaggaaaagtacgtgttctgtctgccgttatccgttgcgcggtaatccggtgtttttgccttcggggnnagcnnnnggnncannnnnnnnnnnnnnnnnnnnnnnnnnnntganaacagcatcgtggtggcagaaaaaccaccnnnnnnnnnnnnngaaccccataacgccattgatgccccggcagtgaagaaagagcccacgatgnnnnnnncccccagcacaatctgcagtccaccctttccggccccggccagtcgcnnnnnnnnnnnnnnnnnnnnnnnnnnnnnnnnnnnnnnnnnnnnnnnnnnnnnnagacgggcgtacaccgcctccggtgnngtnnnnnnnnnnnnnnnnnnnnnnnnnnnnnnnnnnnnnnnnnnnnnnnnnnnnnnnnnnnnnnnnnnnnnnnnnnnnnnnnnnnnnnnnnnnnnnnnnnnnggctgaggcggcggccaaatcgttgtaaatccccgtgaaggcagatacnnnnnnnnnnnnnnnnnnnnnnnnnnnnnnnnnnnnnnnttgccatttttcggaatnnctctcccgtttactcagttgttcaggnnnatggtgaagcagttcaccgttgccgcagtatannnnnnnnnnnnnnnnnnnnnnnnnnnnnnnnnnnnnnnnnnnnannnnnncgccaaagcagcacagcaggatatcgccaggctgtgcggaaggcagggaaatccnnnnnnnnnnnnnnnnnnnnnnnnnnnnnnnnnnnnnnnnnnnnnntgtccaggtanaggttctgaccnttgcgccannnnnnnnnnnnnnnnnnnnnatccggcatntcagtccccgccagatgataagcatcccggaacagcgtgtnnnnnnccgtcacnccgtgctcaaagcgccgtccnnncagatgtggcacacagcggaatttgtgaatgtcaccccggcagaccagccaccagggcagtgcgctttttatctgcagccnnnngtcagcctcgctcagccagggcannnnaccgggatgactgtggaccagtgccacaatctccccctgcatctctgcccgcagccagtcttccggtgcgatacgaaaatacgcctccggnnnnnnnnnnnnnnnnnnnnnagggatataccactccccctccggcgtgcttatcacgaagccgcacgactccgcaggcgcacaccgccgggcatgcgccagaatcgctgattcagtctgtgtcatnnnnnnnnnnnnnnnnnnnnnnnnnnnnnnnnnnnnnnnnnnnnnnnnnnnnnnaagttnnttannnnannnnanncnnnnnnnnnnnnnnnnnnnnnnnnnnnnnnnnnnnnnnnnnnnnnnnnnnggttgtcgaactcatccgccactgnnnnnnnnnnnnnnnnnnnnnnnnnnnnnnnnnnnnnnnnnnnnnnnnnngccccgtccgtctccgtcggtgtcgccagcacaaacgaggccgtcatggccgtcnnntctgacatctgctccaccacccancggtctctcnnnnnnnnnnnnnnnnnnnnntccggannnnccgccacaaaattnnnnnnnnnnnnnnnnnnnnnnnacacccggcggcggaccaccgtggnnnncnccaggctctgcaaatcctccgccatcccggtgacaagnccgaanagattggacaccgtcagcgacgggcgggcactgctgcccttnccgttcatctcaaagccactgccntcannnnnnnnnnnnnnnnnnnnnnnnnnnnnnnnnnnnnnnnnnnnnnnnnnnnnnnnnnnnnnnnccnctcaccgccctgcaccgtcaggtcgatttcccagagcaccacnnnnnntgnntgctctgacttaaccgactcgttcaggctttcttcatgaatattctgcatcagttcannnnnnnnnnnnnnnnnnnnnnnnnnnnnnnnnnnnnnnnnnaaccaccatgccaggataaaaattcatccagccagcgccgggttgannnnnnnnnnnnnnnnnnnnnnnnnnnnnnnnnnnnnnnnnnnnnncagccctgtggggcggcgctgttcataaccntnnnnnnnnnnnnnnnnnnnnnnnnnnnnnnnnnnnnnnnnnnnnnnnnnnncactcacctgcatcccttcacgcgggaccagatgcagcgtttnnatctcagccactcagcattcctccgnnnnnnnnnnnnnnnnnnnnnnnnnnnnnnnnnnnntggtcaatcagctgcacaagactgcctgccgcctccggccctatctgtccgttagccccgtcattcnnnnnnnnnnnnnnnnnnnnnnnnnnnnacaccagaccagcactgccgttcnnnnnnnnnnnnnnnnnnnnnnnnnnnnnnnnnnnnnnnnnnnnnnnnnnnnnnnnnnnnnnnnnncnntcannccggccccttttgcaaacncaaagtacgtgggcgtgtccacaatgctgttgcnnnncgcgctcaggtttnncgaggnnnnnnnnnnnnnnnnnnnnnnnnnnnnnnnnnnnnnnnnnnnnnnnnnnnnnnnnnnnnnnnnnnnnnccgtttgccgccgtcttnatncnnnnnnnnnnnnnnnnnnnnnnnnnnnnnnnnnnnnnnnnnnnnngcattcataagaacttttgatatttnnnnnnnnnnnnnnnnnnnnnnnntgnnccattccacttnntttccgnncagcatctccgtgatnnnnnnnnnnnnnnnnnnnnnnnnnnnnnnnnnnnnnnnnnnnnnnnnnnnnnnnnnnnnnnnnnnnngctgcctgtgaggcgtaatcggacgcattatccnnccagttactgnnnnnnnnnnnnnnnnnnttctgccagtccgcacgctgcacatccgattcgnnataaannnnnnnnnnnnnnnnnnnnnnnnnnnnnnnnnnnnnnnnnnngcctgtctgtaaaaatcctcactgttatccccggtctgatactgagactgaaggtccgcatccttctggcggaagctgtcgcggatctnntgcaannnnnnnnnnnnnnnnnnnnnnnnnnnnnnnnnnnnnnnnnnnnnnnnnnnnccctgcccgtaccccagcagttcagattcatnnnnnnnnnnnnnnnnnnnnnnnnnnnnnnnnnnnnnnnnnnnnnnnnnnnnnnnnnnnnnnnnnnnnnnnnnnnnnnnnnnnnnnnnnnnnnnnnnnnnnnnnnccgccagtgccagttgctctttctgctgcttcagcagccgggaaaanntgtcttccgnnttttccgtctctgattttccacccnnnnntttgggtttattcgcctcgttattgcgccaggcttccagggcattactgatataacgttgtctcgcctcctgatacggatcacccacaaaaccgaggtcatccgcnnnnnnnnnnnnnnnnnnnnnnnnnnnnnnnnnnnnnnnnnnnnnnnnnnnnnnnnnnnnnnnanngggccagctcacgctcnnnnnnnnnnnnnnnnctcnnntgtttatcatccagggtggcctgtggcagccgtaacggcacattcaccagtccctgccgctgctgaagcagttcattccccagccccagcagannnnnnnnnnnnnnnnnnnnnnnnnnnnnnnnnnnnnnnnnnnnnnnnnnnnnnnnnnnnnnnnnnnnnnnnnnnnnnnnnnnnnnnnnnnnnnnnnnnnnnnnnnnnnncnaaagtaccgggccaccccgnnnnnnnnnnnnnnnnnnnnnnnnnnnnnnnnnnnnnnnnnnnnnnnnnnnnnnnnnnnnnnnnnnnnnnnnnnnnnnnnnnnnnnnnnnnnnnnnnnnnnnnnnnnnnnnnnnnnnnnnnnnnnnnnnnnnnnnnnnnnnnnnnnnnnnnnnnnnnnnnnnnnnnnnnnnnnnnnnnnnnnnnnnnnnnnnnnnnnnnnnnnnnnnnnnnnnnnnnnnnnnnnnnnnnnnnnnnnnnnnnnnnnnnnnnnnnnnnnnnnnnnnnnnnnnctgnntgaactgggtgatcaccgagcnnnnnnnnnnnnnactggcaccggatattttcagccctgtcgaaatggcctcnnnnnnnnnnnnnnnnnnnnnnnnnnnnnnnnnnnnnnnnnnnnnnnnnnngtaaccatattcacgcatcgagnnnnnnnnnnnnnnnnncagggccgcattatccgaaaanncnnnnnctgtccgctggctnntatnnatcnnnnnnnnnnnnnnnnnnnnnnnnnnnnnnnnnnnnnnnnnnnnnnnnnnnnnnnnnnnnnnntttcagacgggcattcacggaactccactnnnnnnnnnnnnnnnnnnnnnnnnnnnnnnnnnnnnnnnnnnnnnnnnnnnnnnnnnnnnnnnnnnnnnnnnnnnnnnnnnnnnnnnnnnnnnnnnnnnnnnnnagagcatggcgtccttcagtgcannnnnnnnnnnnnnnnnnnngaaaaccgctttcacgatctgtgcattacggatatcccnncgnncatcacccagcnnnnnnnnnnnnnnnnnnnnnnnnnnnnnnnnnnnnnnnnnnnnnnnnnnatcatcgcctcgctcgcactcaggnnnnnnnnnnnnnnnnnnnnnnnnnnnnnnnnnnnnnnnnnnnntacttttttctggccgactctgcatcagcgatcagttccagtgcctgacgcagcaaccgggcatgtaccggaccatagacggccagcacctgctcacggtcgtccggagtgaacacccgttgcaggtcaatatcacacaggacatcgcagaacagcgtcacatcnncttccaggttacggcgggttttcgccaccaccgacagggtatcgtcatcctctccatcaccattgagcacttcctgccacagataccaggcctctgccgaaggctcccgcagcaccacgctgacatttctccattccggcaccttcaccgttttatgacggaaccccgacagtctggccagcgccagtgttttcagatcttttgccataagccttatccgcccgcaccattaaccgttactgtacacgcatcagaggtaatgctctgcggctgttctgcagaatccgttacctcgcaggtataagcccccttatcacctgactgcgtattggctttactgaaagtgtcagtagtctgtccctctaccggctgaccatccttcttccaggcgtgtttataaggcggcgttcccccgttgacactgactgacattgtcagcagcgcaccggtattcatggtaagtgtcttctccggatttttcacaaacgccagcggtaccacataggacaccggtttacccttcaggcgaagtgaaaacgttgcagccaccacgccgttggtaccggatgaccaggtgtgctgacgcacttccgccaggaacttaaagcccttaccggacggaaactgcaccttaaacgcatacaccgtgtcattgtcataggcatcacgcagggcgttctgggcctgattcagataaaaattacccgacatggaaatctcggacgacgcccccagaccgttgatgttctcctgctctgtggagcagagcgtggtcacatcaatatcctgtttctgaccggcggtgaactggacttccttgatggtgcagtccaggcgcagatattccgccttatccatagtttcagcagtcgccggggcagatgaaatcatcacctgcgtcagctgtgagcgttcatacaaagcagacattctgcctcctgataataaaaaacccgcnnncgnnggggtatgggttttgtagannnnaaagaaaaagtcacaccgtgacctgaaactccagggttgcacggtaacagcggttttccggaatatagtcctgcatttcactgacggatcccggggccagcagcattatggcttcacgggcgtcctgacgtatctgacgcgcctgcgtcacagtcccggcataaacgtctatctgcaccgacactgaggactccgcctgcccgcccatcacgtccgccgacaccgatgaaatcaggctgaaaaccacccacggaagcgccaccgacggcctgccatccagcagggggaccacatacgggtacacctgcccgccggcaagatgcgccagataaggatacaaatccacctccgtcatcgtctcagtatctcatcaatggcccggttcatccgcgcaatcgccacctgagctgcctgttcactgcgcacatcaaacgccgggcgcacaaacgggtgcggtggcatattcacggtccccatttccacaaaccgccagtagaaagcgttgcgcgggttatccgccttcatggtgttatcgctgttaccggtgtccggattaacaccacggatatggacaccggattccatcccgccatcgcgggagcgccgggaaaggaccaccacattgcggcgcagttttcccctgcgtaccggtgcccgtgnnaccacttcttctttcagcacattcgcacccgcacgggttgcctcacgcagcacccggttattttccgcaccactcagaagctgcaaatcgcggctgatgtcctccagccccgaaaaatccagcagggtttcgatcatttttcccctcccagccgacagagaatttccagacgcccgccggtcgcatccggcacgggcannccgacaacgttcaggatccggtcacgccatggaccactcagcacatgaagtcgtgacgctgccgtgatttcccggccggactgaccgcgcacccagatgcggatttccgcctgcgccatttccgcaccggactgcatccgctcccggctgctcctgccacggatatccgcatgaattttcccgcatgacacccattcttctgtcatttctccggcagcattacgggttaacaccggcttcagaacacttatcatctgtgtcagacgacctgcagatattgccattcctccctcctcataacaccgtcggacaacgcaaatcgtaaatcagcacggacacagaaaacggcagttccccctgcacgaggtcttcccgctcagcaagatccggattccggtacagcatcccggtcagtcgcatggcagcccccttcatccgggttaatgcctcgcccgggatcagctcaccgtcctcactaatcactttatcccggctgccctgaatgtaggccagcagcacggcggtagcctgacgaaccttgtccatcagcatgtcatcatccgcgtcatggtcaacacgcagatgtgccttgatctcttccagtgtcagtaatgccgtcattttccgcctcctgcatcccgtccacgttttgcagccagggtccagcctgatgaatgagcttctccgggtttatcaccggtcatactgttgcagtgccacagcgagcccccccacgtcaccgtatcaccggggtggtaggtttcaccggctctgaacacaccgcggtagagcatcaccggcagggaaaatgttttttccgtacgctggccactgctgtgccggatcaccacagagaacaaccgctcccccgtcatactgacgtcaatatccgccaccccgtcaaccaggcattcccatccccgcatcccgtgcgttttttcatacgcccgccagaatcctcccaggtgtgtggcatacgtgccccggggaaaggatttttgatcgtcaatagcggggagcacttccagagccgtggcatcacgcccgtcctgcggagccggcagggcattcaccgcctccagaaccgccttccgcagaacatccggatcgtaatcacgaccatcacgcggagcagggatatggcttacagcctctttcaccatctgctcanncatcgnnnnnnnannatcgggggtgatacttttgccgtctgccggcaccggtattttcgcgaccgcatcattcaccgcctgcttcagtacttccggatcgtagtcacgaccatcacgcggaacaggaatatggcttaccgcctctttcaccatctgctcaagcatcggacgcacatcatccggggtgagacttttgccgtctgccggtacaggaatgctcccgacagcatcattcaccacctgcttcagtacttccggatcgtaatcacgaccatcacgcggagcagggatatggcttacggcctctttcaccatctgctcaagcatcggacgcacatcatcgggggtgatacttttgccgtccgccggtaccggaatattcgcaaccgcatcattcaccgcctgctgcagtacatccggatcataatcacgaccatcacgcggtaccggaatggtccccacagcgtcatccaccatcgcctgcagaaccgggatgtacctcatccaccgtcacatgcttctgtaataccgccgacagggaagccagtttctcttcaaacgcttgtgcctgcgcggccatcttctcctcaaatgtgcgctgtaaatccgccagcaccgtggcgaattcttctcccagtgcacgaataatggacagttcccgttccgtcattttcgcagtatccccctcaacatcgctttcaccgcaccatgctctgtttcactgattgccttattaccgtcagatgcgccgtcaggcagttgggctgaaactcttttcccggacgacgcaaacggatcttcacgggcatcacgacgggacagcgcctccagactgtagttctgctgctgaagatacagtgcatcacctcccgcaaggggcggcaggttctcacgtttacgggcctcattgggcgtgagaagcgtatttttcaccgactcacccagcgttttcatgcgccgttcgctgtccattctcagcagcgtggtgacgtcaaactccgtactctcgttttcccccgtttccagcgcctcatccagtaacagttcaatggactcaatcagcgtctgcaggcactgggaataatactgctgctccagcgcctccacgttgtcactggaaggtggctggccaacgccaatcttgtaggccgggacacggaacaccgaacagacaatttcagcggtcatcttcagttgttccaccgtctgcgcatccaccggtgaaaacgtcgtggggttgtattttgccccgttgctcaaaatggccgttttccccgcattttcgccggtatacccgctgtcccagttgctcttcagttttttcgcattttcttccgtaatactgccggggatctcaatcaccccggacggcctgccgccatttctgaaaaaagacgtcgaattttcctgaatatgatgcccctgcgtggccgccagcccggcggcatacaccggcggcagccccacaagcggatgaaaaaaacagttaaaccggtcgtggatcacttcccgggcaggcaccgtcaccgcctccgtgatcccgcagttccggtccggcgtgatgcgatagaacacctcgccgtcatccgccaccagaggttcaacccggctccagtccagaatacgcagttctttgatctgcccccgggagttacggattttcagcaccaccgtattgccgtgacgcagtttggcgttcagccacagttcaaaaaactggatacgattctgctgtgcattgggacgacgacagagacgggcaatatccccctgccgtttttcacagcggatcccctgtgtatccgtctgcatcaggcgcagccgcattttggcgatatcctgggatatcagcgaaatgcaagaaaacaccgcatgaaaggagaggacactttccggatcggctttcacaccctgctgccaggcgccggcaaagggctcagccaccgcctgaaacaggctggtccagcccacctcttttacatcacgtcctgatttctggttttttcgggttcgtcgcaaaaggttccacattcgctatgctccgcatcatgtttctttttctgacccgccggacgtcgcgctgtgatgtactccgcctttcccaggcgaaccagcacctccgcacacggctgtgcgacatcccggatatccccgggccgggcatcatgtgtaccctgcagatatcggatttttgccatcagttactgcgggacgctctcacctcccgccctcctcatcagactcagccgccggacgcactgccgtagttcacaccggtgatcacagccaccgccgcagtacggcgacgacgccagttgatccagcgctccgcacggatggccacgctgccggtctggaacatggaaaccagctccaccggcgacggtgtggtgctgtcgccgcccggctcagactgcatttccagtgacgcttcacgggacatatccactgccacaccgccgtcatccgccagataaatatccggtgcattcaccagtaccagctggtcacccacatactgggagacaatcaccggaagcccctgaaaggtcccgcccagcagggtcatgtccggatattccttctgacccagcgcatttttacgcatggacagcgccagggcattcgtgctggacatcagccagacagcaccagtgggctgcagatttgccgtcacaaactggccaaacgcggcctcggcatccgcatccgggttaccggttgatgccgtgcccttcacatcatgggtgatggacgccggggagacatctgccactgcagcttttttcgggtccacaaagtctgtgtccagacgcgccaccaccgcttctgccagcgcattacggaccagtgcatcagctgccggactggaaaagcggatcagctcttccgtcagtaccgcaatggccgacaccttcgcatgactgaaggtgatggactcaaaatcaaacttcgtcaggggtctggccttaccctcccccacccagccggcagcaccgccggacacctgggcatgcacgcggatattgaacggcaccagacgaagtgcagggatcccgccctgaccaaatcgcccgataatggtctgcggacgcaggtaatcaataaagtcctgcgcatattcctgatattcagacaggctgcctgcccactgtgggtccgtggtggtccctgcccccaccgccgatttcaggacatgatgcagacgactgtcatccggatactgacgacgggccacttccagggcttcagagcggacacctttagccgcggccagwgatttggcaaagcgggcgaaaccaatccccttctccagtttctgctcaacacagatcaccggcgctgaagccaccgtggccacattcccgttaccggcctgtttcaccggctgtgccgtggcggccttactggtttccagttcacgcagacgcttcaggtgcgcatccacctgacggatttccgctgcggtgttgtcgtagtgctcttcctcttccacatccagtgtgcggccttcctctgcggctttgttcatgatctcctcaagggaggctgccagcgccgcacgcttgttttcaaaacttttaatctgttcaccagtattcattgctgacttttccttatgaaaagaggttattgactgtgccgaagcgccggcagaagatgcgattttcaccaccggtctccggttgccggacgcggcagaaaacgggctgccgaaagatttaatggtccggatggtgcattccgcattcgcgggcacggtgacggcagacacctccatcagttcccagcgcagaaaatgcagtccgcctccgtccagataagtgtattcatggggccggaagcccacagaaagccccctgaccagcccggtcttaatggcagcccaggcttcatccagccgggcagccagctgcgacggcatatccggtacgggcttcaccagtgttgccgtgatttccagaccttcactgacccggcgtaccgtacactggcccaccggacgggaatagtcatgctgccagagaaacgggatcgcactgccaaactccnccccctccggctccaggatgtcaccatcccgatccggagaaggcgttgacgcaatcccggtgatcacccgnncatcctcactgaaggatttcaccgtcagcagggaacaggcccgtttaagagtcacatcagcctcctgaaaatnnnnnnnccgccgcagcggttcatgatggttacagggtgagcagggttatatgaaaaaaacctcatacgctttctttttcggttccggattcagggacatcagggacaccgcattgaagagcgccatcagcgggtcaatttttccccgtccgctggcctgtttggtgataagaatggcgttacctttaggctccacccgggcattgccaacgcaccaggccatcagtggctgaccaccatgcaccagcactccctcagccagtttgcgctcggtggttttgatggccccgcccagcttccagccctggcttatccccaccacactctcatcggggatcccggcttccgccagtgaatccagaatctgccccacacctgacgggtcaataccgatatgatccagtaactcagcctcatgaatacgacgcacatactccgccacttccgccgtgtcatccccgacccgacggacaatcgtcatgtctccacaggccacaaaatcctgaaaccgggatgcctcactcttccgtctgaccaccgcggtttcatgcacccaggcatggccccagcccagccattcgcgggtttccctgtcacggccaatcacgtacattcccagcagatcatccaggcccccgccgtcaatccccaccgtcaccacatcagcgcgctgcaggatatcgtccaggctgacgcgcctgccctgctgctcccagaaatccgcgcccgcccagcggtcagaacgcagggcaagaccgatttccacattggcgtgttttgacatgaagccacgaaatgcttcctcaccagcctcccgggctttacggtactcccggtacagaaaagcctcatccaccgaataaccgagattcgggttaaccatggcgaggttttccatcagcaggngagccccgctttccaccatttcaggaggatgctcaaaaatcaccggcagaaagtgcggatcatgaattttgccgtcacggacatcccgggcgtactgcagtttctgtctgaacaccccggcaggcggttcattcgactgggtggttgtgtacaccacaaatccttccggacgggaggcaagcccgccgatggcttcacgtagcatgtcttccgctttgtactgcttgccaaacagccacagttcatcaatcagtgtccccacggacttgataccggacaccgtattcggatcggctgccaccaccttcagggtggtgtccgtcacccgatgggtgatggtccggatatgtgtctgcacctgacagaggtcatccagatcatcgtcccgtcgtaccatatccctggcagggttgaaggcgttagccgccacctccacggtcggggccagaatggtgtagcccgccgcctgccgccagttcagtaacagcgccgtcatcatgatccccgcggccagcgtggacttactgtttttcttggggataaggataaaaacttccttgatatggcgtacaccggtctgcgcatcataggagccaaacagggccgccaccaggtcaaacacccactgtgcgcaggactccccgaacgtcgggctacccggtgcatccacaatccgcagttgtttaaaaatcgccagtgcatgtgcagcctggtccggataaatcggagccggaataatcgacagtccctttttcaggcgctctgcccagtccggacatgccgtgctccatacaggtatcatccgctttcctcattctggttattcaccaccagtcggggagatggtggcaccgaaaaacggttanncgcttttttcgcggcatcaccttttgccgattttttaccggcatcgccttttttatggtgtgtgaactgcgccagtcgccaggccgcatccagtgccagtttcgggtcaattatcaggttttccaccaggatctgccccatagctttcaccggatcgggaagaccatcctccatatattcaataccatgagatatcaccgcgggcggaggcatctccggatttgtttcgtccggctgtggtattgcagccacctcacggcgacggggtttatcctcctgctctgattttttctgccggtaaacaggaacctcatccacctccaccgtttcgcactgtttacgggctataaacgcgagcacctccggatcttttgccagctgcgagcctttaatcctggcggtcttcgccgaataaccggcggcaagggctgacgctgttttgtttttcccggacatgagcgccagcgcaaattttcgtttttgcgttgtcagcacagcctcctcccgggtccataacgcactcagccgggtatggttcagcccatttttcccggcgtctcatgccgcaaatgttaactgctgcctggttaacatttgctgaaaaagccagttaacatttttttcgcacaacaaactgaataataaagataaaaaccgaaaaaatgcccgggcagccagttaacatgttaactggcctgaaacaggaattttttctctgcatgagacggggggcggtgtccggggcgatcgtttttttcgccggatgatccccccccnggggcgggtcacagtccgatgatatcgtctgccctgccatgacctccggcagcgtcgggtccggcataccactcgccgtttcactgactgacttctggcgatggcattcggtacagagcgtccagagattcgtctcctcattaccaccaccgaactgaagtgcaatgcggtgatcgagttcactgtcacaaaggtcaaccacacgcccacagagacagcactgtccggcatccctcagccagatacgacgcttgagggaaacccgggcactgccactgacccgacgctgttcacccttcaggacattcacccgccgggtattcagagttttgattctgcccggtaacgtacgaagcacggccatgtaaaatcctcgccatatagcttgtcaccagaggaaagaaaatgtcaccgaaaaaccggacccgcagaacaacaacccgcaacatccgatttccaaaccagatgattgaacaaattaacatcgctcttgaccagaaaggttcaggtaatttttcagcgtgggttattgaagcctgcagaagaagattaattaatgaaaaatattctcaatttgtacccaacaaagacaaacacgaccagagcacctgttcagacaggtttacttaaacgacttatatatgacacaaaaagcgaccactaaagtcgctttttcttatggtaacaggcaataactctctcagatattttttagcatttttttgaccgcgcgtttccggacgtattctgttctcctgtccctttatatcgtcggaatacccgccgctcttcaaatcccattcccaactcagaatgtagtctgttgaccgcttgttttatttcggtcaggttcaccggtgnnannggagtccggcgcgccttacgcaaacactctgctcgtttctgtgccgccacttttcttttctggtcatcacttagctgtaccatcacttttgcccatcgttcagctgctctccggtacagtccttttttctccagacattctgccacgtgatcatgtagcataagtgacctccgattatctacagactgccatcctgaatttaccttcccttaatgaaataacaataaaaaacaaaccacgcaaaaacaataaaataacacacaaaaaaanntaaataataaacaaaaataatcaccttattttattattttttgagggggcaattactgaacaaaaaacnntgactatatactcaaaaccaaacaactattctgccaatcaggtatcatggcaacacacggaattaccgtgtttttgccttctctgcccatacaatacgggcatatacttcatactctattgtaatatttctatccatgcgccccactccatttacctgtaaataatattcaaaatatttatcacagaaatcgtttttggccatgaactgagcacactataaagtccggaactgactctttgttaaattaccttaatgttaccagtaacaccttcataacaaaacatcacggtatacactgggtacggatatattcctgtgctccttccagttgcttctgcattgccatcagccgttctctgaggatgaaataatcccgttcagcggcttctgccagtcggggaccggttgcattacccacgccggaggtgatgggggctttacgcaaggagcctggacagttggcgttgatgcgcaggcgcttacgaccagcggcaacatcagcacgcagagtttcattttcagctctcgcatcggctaattccctcgagtatctggcatcaagtgcagcgacatcacgctggcgtacctgcatatcagtaattgtcacgttcgccagcttcagctcactggcttttttatcgcgttgcgctttgtaggtaatggcgttatcgcggtaatgattaacagcccatgacaggcaggcgataatgcagataaccagagcggagataataacggttaccctgctcattgttgcccccacaaacagacttcacgctcaatctcgcggcgagtcatcagccctttccattgcttaccgccagcgtatgtccagcgccgtagctgatcacatgcgcctttgatatcgccctggtttattttgcgaagaagcgtcgatgttctgaaattgccagcgcccacgttgtaaacgaacgagtaaagagcgccgcgcgttgtttccggtatatcgactttgatgtacgggttaatttgtctggcgaccgtggcaaggtctttattcaggagggctttgcattctgcttcggtatacgttttaccgggcatgatgtcttttccggtgtgtccgtgacatacagtccatacgccaacgatatctttgtatggtatgtagctgacaccttccagaccatcgttaccacctggaccagtgatgagcacagacgctatggcaacagccccaccaccaatagcagctgcaacagccttgcgtaatgacggcgacattattcacctctcgcagccttacgcttatcttctttaatcttgaaataaagatttgtcagatacgtcagcaggccaaacagcagacttcccagcacacctattgccacccactgggacggagagactttgtccagcagctgcagtaaccagtatcccgtccccaccgctgacgtggtgtatgacacacctgttgtgattttttccatctgatgtatgtctccgtcaccgccgacagaaaatgaaagtaaagaaaaacaaaaaagccgccagtgtcacccactgacggccaacnccgggagccgtgattatggcattcaggctctgctaaaaatgccagataacattccggcctcccnntgattcaggttataaatgacacaatatcttgacaacatccgtcactgtctgtcagaaannnnnnnnnnnnnnnnnnnnnnnnnnnnnnnnccanctatccttntgagccagcacctctycaccgaaagtcagtgctggctgtttttttccttaataangcatctgtaactgaaacaatccgcatattgataatatattgacaggcatcattgctgtctgtgaaaaataagtctctacaaacatataaggccttttagccagcgtcttctttcaggtcagtcgctggctttttntttattatgctgccggtgcatttatctccagcancagactttctatctcaacgccatannnnnnnnnnnnnnnnnnnnnnnnnnnnnnnnnnnnnnnnnnctgngtaaagtacgacatcaggaacggattaccggtacccgtcatcgccacaccatnnnnnnnnnnnnnnnnnnnnnnnnnnnnnnnnnnnnnnnnnnnnnnctgccgccctgtgtcagcagggtannnncgtcatccaccggatgcgnnannnnnnnnnnnnnnnnnnnnnnnnnnnnnnnnnnnnnnnnatagcggttgccagacgatccggaataatgctcctgcgcgcccatgaactgaaatgtgtcgggcggtttgatgatacctggtttccattcgttctcgatgccgcaccgtaatatcctgatgccggaatatccggannttcnnnnnnnnnnnnnnnnnnnnnnnnnnnnnnnnnnnnnnnnnnnnnnnnnnnnnnnnactctccctgtttttatacccgccgtacacggtgtcgtactgggtagcgtatgtatttttccagtaatacgtcgtgtcaccacaaacccacggcacatctgcagcactgccaccatggcactgcgcgttaaacacggagaggtcagcacgaaactgtgtcagcatggctgtaaacagcgcaggttgctgtgcgtgggtggcggcgctcatgtcaaactcaccctgcatccagcagacggccagcagaacgtttttggnnnnnnnnnnnnnnnnnnnnnnnnnnnnnnnnnnnnnnnnnnnttgtgcgggaaatcagatcctgatataacggcttgcccaccccccagcgtgccgaatccnnncnnnnnnnnnnnnnnnnnnnnnnnnnnnnnnnnnnnnnnnnnnngccctgggtaaatgccgaaccaccacgacagcatggtaccagcannnnnnnnnnnnnnnnnnnnnnnnnnnnnnnnnnnnnnnnnnnnnnnnnnnnnnntcagcgtactcatatcctgcacatcatgcagncantggtcngnnnnnnnnnnnnnnnnnnnnnnnnnnnnnnnnnnnnnnnnnanncccacccggcgtcactgtactnnnnnnnnnnnnnnnnnnnnnnnnnnnnnnnnnnnnnnnnntnntgcgcggatccggagcatcgtatgaatccggcagcggnnnnnctnnnnnnnnnnnnnnnnnnnnnnnnnnnnnnnnnnnnnnnnnnnnnnnnnnnnnnnngatgacgtagtaccaatccggctnnnnnnnnnnnnnnnnnnnnnnnnnnnnnnnnnnnnnnnngcaatcgcctgcatcagggtataaggnnnnnnnnnnnnnnnnnnnnnnnnnnnnnnnnnnnnnnnnnnnnnntgccagccctctttcagtttgtgtgtcagcttttccgcaaggtctgacggcgacnccgccctnnnaacatngtaatgtttaatcgacatcgaatttctcccrtgcnsaggaacagagttaaaaagccggaancggaatcaaatcacaggatgaccatctgccagtggctggtcgtaaaaaaaaggccgcgccatgcnnnnnnnnnnataaagggataacgatgatagtttgagaaaaacagaaataacacttttgnnnnaaagcatggtgccgggtgcctcccggtgaattcagtatcagcacctgaatccacgattatcccatatacnnnnnnnnnnnnnnnnnnnnnnnnnnnnnnnnnnnnnnnnnnnccgcacagggggattcaccatgcagaagtgtttttaataaacagcaaacaaaaaaatcaagcattatgcaggctgtttctttttatcaccggccacagcaataccanaatgccgcagaccagccccccatccgccagcaccgacatgattctgctggnnaaatccaccatcaccaccagaaacagcaggagtgcagccacagtcaggcgcagttttaccgtcannggtnattnnccagacgaagncccagaacaccggcaatctcttccagcaccttgcgctcttccggctcaattnngnnnnnnnnnnnnnnnnnnnnnnnnnnnnnnnnnnnnnnnnnnnngnncaccgccacatccagcacatcttccgcnncacgcgtatcgtgtttcacatcctcgatctcacgtaacgccgcacgacgaccantnnnnnnnnnnnnnnnnnnnnnnnnnnnnnnnnnnnnnnnnnnnnnnnnnnnnnnntaatttctgacgtaaacgcggacagcgcaggctgattacgcagtacctgttcgatcttcgctttnnnnnnnnnnnnnnnnnnnnnnnnnnnnnnnnnnnnnnnnnnnnnnggcgttaatcaccacctgtgccagatcgcgttnnnnnnnnnnnnnnnnnnnnnnnnnnnnnnnnnnnnnnnnnnnnnnnnnnnnnnnnnnnnnnnnnnnaataccaaacatcgtgacgttcctttgggtgggtgagccaacgcccgggagcgatctgcnnnnnnnnnnnnnnnnnnnnnnnnnnnnnnnnnnnnnnnnnnnntccgtaanntccccccnncccccccgaaaggctctgtggttnnnnnnnnnnnnnnnnnnnnnnnnnnnnnnnnnnnnnnnnnnnnnntacnnaaaagnnccgcaaaagcgagccgggaaaataagtgtngcgcgttgtactggagtcgaaccagtgaccgattgcttagaaggcaattgctctgtcctgctgagctaacaacgcagaataccgatnnnngannnnnnnnnnnnnnnnnnnnnnnnnnnnnnnnnnnnnnnnnnnnnnncaccactgagctaaagggnnnnnnnnnnnnnnnnnnnnnnnnnnnnnnnnnnnnnncgaaatcaatgttgcaagcannnnnnnnnnnnnnnnnnnnnnnnnnnnnnnnnnnnnnnnnnnnnnnnnnnncaccagcgcattcaccatgtctatccgnnnnnnnnggcacaanaaaacccgcttgtggnnnnnnnnnnnnnnnnnntgccatcacgtacaaaatcggcaaaatatcagatttgcannaaanatatgcnnnnnnnnnnnnnnnnnnnnnnnnnnnnnnnnnnnnnnnnnnnttttgttttgaacgtgttctnnnnnnnnnnnnnnnngcctcactatccagtcggtgaaaaatgtgtnnnnnnnnnnnnnnnnnnnnnnnnnnnnnnnnnnnnnnnnnnnnnnnnnnnnnnnnnnntccccaccaaaaagttctgcttttactgcctgcgcnncnngccnnannnnnnnnnnnnnnngttcctgcgttttcccagcaatttttctggnnccggattgagtattannttcnnnnnnnnnnnnnnnnnnnnnnncgatctgatattcccaacaaatnnnnnngctgtaacaccacaacaaccaggcnnnnnnnnnnnnnncaagagacagaacagcccgccgccacgatgatgncgnnnnctcaaccggactgaccagaggaattgacgtcacnntcgccagcgattgctttcccgggattggtggattatcccnnnntatnnnttttccagtcacttcatcgcggnnnnnnnnnnnnnnnnnnnnnnnnnnnnnnnnnnnnnnnngcttcaagctgaccttttgttgccncactcaaannnnnnnnnnngataatgagctgctcacgcacaaactgtaaatagtggttannnnnnnnnnnnnnnnnnnnnnnnnnnnnnnnnnnnnnnnnnnnnnnnnnnnnnnnnnnnnnnactgctcgtcgtctatgagaagtccggcatgcgtcagcacatccagtggtgctttcaggatattgtccaggtcacgacggcgcttatccggtggctctgcaataatctttatcaccagccttccggacaggtttaatttcaaccgctgctggcnnnnnnnnnnnnnnnnnnnnnnnnnnnnnnnnnnnnnnnnnnnnnnnnnnnnnnnnnnnnnnnnnnnnnnnnnnnnnnnnnnnnnnnnncnnnngcgggtaaggcaaaacaaantctatnnnnnnnnnnnnnnnnnnnnnnnnnnnnnnnnnnnnnnnnnnnnnnnnnnnnnnnnnnnnnnnnnnnnnnnnnnnnnnnnnnnnnnnnnnnnnnnnnnnnnnnnnnnnnnnnnnnnnnnnnnnnnnnnnnnnnnnnnnnnnnnnnnnnnnnnnnnnnnnnnnnnnnnnnnnnnnnnnnnnnnnnnnnnnnnnnnnnnnnnnnnnnnnnnnnnnnnnnnnnnnnnnnnnnnnnnnnnnnnnnnnnnnnnnnnnnnnnnnnnnnnnnnnnnnnnnnnnnnnnnnnnnnnnnnnnnnnnnnnnnnnnnnnnnnnnnnnnnnnnnnnnnnnnnnnnnnnnnnnnnnnnnnnnnnnnnnnnnnnnnnnnnnnnnnnnnnnnnnnnnnnnnnnnnnnnnnnnnnnnnnnnnnnnnnnnnnnnnnnnnnnnnnnnnnnnnnnnnnnnncccggtangatgtcgctnncacgnnnnnnnnnnnnnnnnntttccgcacgnaaccccagcgaacgacgtaataccgnnnnnnnnnnnnnnnnnnnnnnnnnnnnnnnnnnnnnnnnnnnnnnnnnnnnnnnnnnnnnnnnnnnnggataattcagccagagataattcacgctcctgnnnnnnnttcattgcgtgacggatgatgtcaatcatcnnnnnnnnnnnnntctgttgagcnngttgatccagtgaatcagatgtctgctcccgnngctnnnngtcgcagtgccagcacaacaccannnnnnnnnnnnnnnnnnnnnnnnnnnnnnnnnnnnnnnnnnnnnaatcaccgtgtanncacnngcagnnnnnnnnnnnnnnnnnnnaccagtcagacagtgcaccagcgccacccnnagcnnnnnnnnnnnnnnnnnnnnnnnnnnnnnnnnnnnnnnnnnnnnnnnnnnnnnnnnnnnnnnnnnnnnnnnnnctccagatncgttgctggaatgtgcgggnnnnnnnnnnnnnnnnnnnnnnnnnnnnnnnnnnnnnnnnnnnnnnnnnnnnnnnnnnnnnnnnnnnnnnnnnnnnnnnnnnnnnnnnnnnnnnnnnnnnnnnnnnnnnnnnnnnnnnnnnnnnnnnnnnnnnnnnnnnnnnnnnnnnnnnnnnnnnnnnnnnnnnnnnnnnnnnnnnnnnnnnnnnnnnnnnnnnnnnnnnnnnnnaaaccagaatgccaggaaaaaacaaaacccgccgaagnnnnnnnnnnnnnnnnnnnnnnnnnnnnnnnnnnnnnnnnnngaggtggcgagggatttctcnnnnnnnnnnnnnnnnnnnnnnnnnnnnnnnnnnnnnntctcttactcctcaggttcgtaagctgtgaagacagnnnnctccgnnnnnnnnnnnnnnnnncgnnnctcgnngaggtctttcctnnnnnnnnnnnnnnnnnnnnnnnnnnnnnnnnnnnnnnnnnnnccttttgctgcttcatagcctgcttctccttgcctttcgnnnnntaagaggctaacctacatntnnnnnnnnnnnnnnnnnnnnnnnnnnnnnnnnnnnnnnnnnnnnnnnnnnnnnnnnnnnnnnnnnnnnnnnnnnnnnnnnnnnnnnnnnnnnnnnnnnnnnnnnnnnnnnnnnnnnnnnnnnnnnnnnnnnnnnnnnnnnnnnnnnnnnnnnnnnnnnnnnnnnnnnnnnnnnnnnnnnnnnnnnnnnnnnnnnnnnnnnnnnnnnnnnnnnnnnnnnnnnnnnnnnnnnnnnnnnnnnnnnnnnnnnnnnnnnnnnnnnnnnnnnnnnnnnnnnnnnnnnnnnnnnnnnnnnnnnnnnnnnnnnnnnnnnnnnnnnnnnnnnnnnnnnnnnnnnnnnnnnnnnnnnnnnnnnnnnnnnnnnnnnnnnnnnnnnnnnnnnnnnnnnnnnnnnnnnnnnnnnnnnnnnnnnnnnnnnnnnnnnnnnnnnnnnnnnnnnnnnnnnnnnnnnnnnnnnnnnnnnnnnnnnnnnnnnnnnnnnnnnnnnnnnnnnnnnnnnnnnnnnnnnnnnnnnnnnnnnnnnnnnnnnnnnnnnnnnnnnnnnnnnnnnnnnnnnnnnnnnnnnnnnnnnnnnnnnnnnnnnnnnnnnnnnnnnnnnnnnnnnnnnnnnnnnnnnnnnnnnnnnnnnnnnnnnnnnnnnnnnnnnnnnnnnnnnnnnnnnnnnnnnnnnnnnnnnnnnnnnnnnnnnnnnnnnnnnnnnnnnnnnnnnnnnnnnnnnnnnnnnnnnnnnnnnnnnnnnnnnnnnnnnnnnnnnnnnnnnnnnnnnnnnnnnnnnnnnnnnnnnnnnnnnnnnnnnnnnnnnnnnnnnnnnnnnnnnnnnnnnnnnnnnnnnnnnnnnnnnnnnnnnnnnnnnnnnnnnnnnnnnnnnnnnnnnnnnnnnnnnnnnnnnnnnnnnnnnnnnnnnnnnnnnnnnnnnnnnnnnnnnnnnnnnnnnnnnnnnnnnnnnnnnnnnnnnnnnnnnnnnnnnnnnnnnnnnnnnnnnnnnnnnnnnnnnnnnnnnnnnnnnnnnnnnnnnnnnnnnnnnnnnnnnnnnnnnnnnnnnnnnnnnnnnnnnnnnnnnnnnnnnnnnngccaccggttctgcttccagcgatgccagtgcannnnnnnnnnnnnnnnnnnnnnnnnnnnnnnnnnnnnnnnnnnnnnnnnnnnnnnnnnnnnnnnnnnnnnnnnnnnnnnnnnnnnnnnnnnnnnnnnnnnnnnnnnnnnnnnnnnnnnnnnnnnnnnnnnnnnnnnnnnnnnnnnnnnnnnnnnnnnnnnnnnnnnnnnnnnnnnnnnnnnnnnnnnnnnnnnnnnnnnnnnnnnnnnnnnnnnnnnnnnnnnnnnnnnnnnnnnnnnnnnnnnnnnnnnnnnnnnnnnnnnnnnnnnnnnnnnnnnnnnnnnnnnnnnnnnnnnnnnnnnnnnnnnnnnnnnnnnnnnnnnnnnnnnnnnnnnnnnnnnnnnnnnnnnnnnnnnnnnnnnnnnnnnnnnnnnnnnnnnnnnnnnnnnnnnnnnnnnnnnnnnnnnnnnnnnnnnnnnnnnnnnnnnnnnnnnnnnnnnnnnnnnnnnnnnnnnnnnnnnnnnnnnnnnnnnnnnnnnnnnnnnnnnnnnnnnnnnnnnnnnnnnnnnnnnnnnnnnnnnnnnnnnnnnnnnnnnnnnnnnnnnnnnnnnnnnnnnnnnnnnnnnnnnnnnnnnnnnnnnnnnnnnnnnnnattaccgccctttcnggcnnnctnnnnnnnnnnnnnnnnnnnnnnnnnnnnnnnnnnnnnnnnnnnnnnnnnnnnnnnnnnnnnnnnnnnnnnnnnnnnnnnnnnnnnnnnnnnnnnnnnnnnnnnnnnnnnnnnnnnnnnnnnnnnnnnnnnnnnnnnnnnnnnnnnnnnnnnnnnnnnnnnnnnnnnnnnnnnnnnnnnnnnnnnnnnnnnnnnnnnnnnnnnnnnnnnnnnnnnnnnnnnnnnnnnnnnnnnnnnnnnnnnnnnnnnnnnnnnnnnnnnnnnnnnnnnnnnnnnnnnnnnnnnnnnnnnnnnnnnnnnnnnnnnnnnnnnnnnnnnnnnnnnnnnnnnnnnnnnnnnnnnnnnnnnnnnnnnnnnnnnnnnnnnnnnnnnnnnnnnnnnnnnnnnnnnnnnnnnnnnnnnnnnnnnnnnnnnntcnncacagagagcatccagtcannnnnnnnnnnnnnnnnnnnnnnnnnnnnnnnnnnnnnnnnnnnnnnnnnnnnnnnnnnnnnnnnnnnnnnnnnnnnnnnnnnnnnnnnnnnnnnnnnnnnnnnnnnnnnnnnnnnnnnnnnnnnnnnnnnnnnnnnnnnnnnnnnnnnnnnnnnnnnnnnnnnnnnnnnnnnnnnnnnnnnnnnnnnnnnnnnnnnnnnnnnnnnnnnnnnnnnnaccgcctcctgaaaattaccctnnnnnnnnnnnnnnnnnnnnnnnnnnnnnnnnnnnnnnnnanntctccgtcaggtaactttcgaatnnnnnnnnnnnnnnnnnnnnnnnnnnnnnnnnnnnnnnnnnnccggcaatcacttttccgatacaacacggcgggaagaatcagtaatctgtcgaacaatatcccggtgcttgttcagctcccgcagnnnnnnnnnnnnnnnnnnnnnnnnnnnnnnnnnnnnnnnnnnnnnnnnnnnnnnnnnnnnnnnnnnnnnnnnnnnnnnnnnnnnnnnnnnnnnnnnnnttaccgttctgattaacgcgtgccagccgccccgttgnnnnnnnnnnnnnnnnnnnnnnnnnnnnnnnnnnnnnnnnnnnnnnnnntgcgagtactgacgccgaacttacccgccagttcctcacacgttttagcaccatcctgaccgataaactcaatcatcatgtctgcggtaactttttgttcgacctccccggtcagcatatcctgtgcttcagattttactggccgctcttcggttacccgggattcaccttcgccagccagaaaccaggtgtgacccgttttatcaacaacgccattttttttgagttcccacagttcgttgagaacttcttcacggctgatatcaagccgcgccgccagttcaacagaattggctttacccatcgctttcagtgcatgcaatacggtttccattaaaacttcctccggataaaaattacttctcagttcctgtgctggctgacgttcggacgccagctctcccagttaaacgtcacccagcgaccaccgttcatggacatgcggtccatcacccgctcgccgagaagtgtattcatcgctgcatggttaagatttgtcagcatccccacactgagtaacgatgccgttctgcggtcaacaatctgattcagcgtgacctgctcattacgcgtatcccgttgcatgccaatttcatccagtaccagcaggtcaacgccacacaatccctgcaaaaatttttcgcccgagtttttgttgtcgtagctgccatgtaacgccagcatcacatccgccactgttatcacaatcacactgcgacctttcgccagaaggtggttgccaatagccgccgccaggtggttttttcctgtgccaggcctgccactgaaaacaaaattcgtacagcccttccagctctgccgcaatggatttcgcctgactcagggcatggcgctgaccatcgttctgcacccggtagttaccgaacgtacacttccggtgaagcggctggataccggagcggttaatgattttttcaaccngnntctgatgattcagacgattaacctcctcgcttcgcttacgcccttcagcaagctgccattcccgccactccgccaccgtacggtacggagggattgcatcctgcggcacaaatctgctgactcttgccagaacaccacctgacgtaatgtttttcatggtgcgctaccccctgaaacccggcnnnnnttcggtatccggttcagaaatatgattcacgcaacgctgcgcgggcgaacgccccaggcggataaccagttcatcccatttttcccggagttttgccggactcatgatgttttttacccagaacgaatcccnnnnnnnnnnnnnnnnnnnnnnnnnnnnnnnnnnnnnnnnnnnnnnnnnnnnnnnnnnnnnnnnnnnnnnnnnnnnnnnnnnnnnnnnnnnnnnnnnnnnnnnnnnnnnnnnnnnnnnnnnnnnnnnnnnnnnnnnnnnnnnnnnnnnnnnnnnnnnnnnnnnnnnnnnnnnnnnnnnnnnnnnnnnnnnnnnnnnnnnnnnnnnnnnnnnnnnnnnnnnnnnnnnnnnnnnnnnnnnnnnnnnnnnnnnnnnnnnnnnnnnnnnnnnnttaaaaaatcctgttcagtcgtctgcnnnnnnnnnnnnnnnnnnnnnnnnnnnnnnnnnnnnnnnnnnnnnnnnnnnnnnnngaagatcttttatctgacggatcaggttttaatactgacggatcggggtcaatcatcgcccccctaatcgnnnnnnnnnnnnnnacagttgatccatcaaaatttgacgggtcaaccgttgaggggtcaatatnngacgggtcaactgttaacgggtcattttttgccgggctaatttttcttttcggtttatatgactcacgcgccgnnnnnnnnnnnnnnnnnnnnnnnnnnnnnnnnnnnnnnnnnnnnnnnacattaagccgatagatattgcttacattacgcccaccgaccttacgctcttccttcgtcagccagccctctttcgccagttctgcaatagccgatttcactgtggattcacttcttgcaccgatctgacgccggatagtttcaatggcaggccatgacacgccctcgtcattgctgtagtctgcaagacgggccataaccgccaccctggataagatcatgccggtgaaggcgcacccttcccagacaagaccatgaagcttgctgctcataaaacccccgaacaccgtgcttttagtgcatcaccacagcattccctgccgggccgccgcgattcatctggtcatacaaaacaaccgctgacgcaacaaaatcatcgacatccttcaccagccgatccctccgttcgacgatctcacggtaatattcagaactgtggctgcgcatacgggccaccagcaaaggcggcatcgccttttcgatcgccggtaacagagcctgcattttttcaacagcatcaggggtgtctttctctacccagcggaaaattttctgggtattgcgagccagggcttccggatggctgtcgtcatacagttctgggaacgtcatacccaactcaaaataagcctgggttattccagctgctggaactttttcgccatcaggacgcgcccaggcattcatcgccatgcggatgtgttcatgcttgattttcatgaatcaagctcctagaaagtggttgtgttaacgttttggtatcttccagctcgggccaaatattcatccaatcaaaaggccttagttgctgacgtgtaacttcaccattactggctcgctcaataaggacacataacgatgcccctaacacttgacctttactcaatgcctttcttagataaccgatgctggtaccacactcgcatgcaaacatacgctgttcatctgacgaaagagaattgagaaatattcttaattcttccatagctactccttagtaaacacagcaaagaatacccacaggtaaacaaaagtcaatacccacaggttgtttaccttgcggtaatcgcatctattatttacctatggacaaatatgaatttagacgacagcaactcatcaaaattcgtgatgagaaatgcgatggtaaagcggttaacgtggccagaaagatcgggcgcgagccttcttatgtatcaagaatgttgtacccagaggggaaaaagggaaaaaaacggatcgctgatgatatggtggagattatcgaagagtcctttgggttaccccggggatggatggatggtatngnnttcntcatcaacgaacacagcctccagttatgaaacaagggttctaacgccacgacaacgtatttttttagatctcttagacgaactgccagaaagtgaagcggataaattattaaaaactcttgaagagaaaaaacagtattacaatatgatctacgaagaaatccgtaaaaagaaagcacaaaacgcatcatagctcaccaaacaactagtcaccagttaagacaccgcnnaaanntnnnnnngggtatttactttttaaatacctatgggtatccttcttttcataccaacccaccccgccccacagaatgcngggcaatacttcgagttaccaggcagtggtcaggggttaagtagccagcccgaggcgtaagaacatgacggcagggttcaactttaataactatgcagcaggtttttgttccgctaccccagcgttaagggganatgaggtcagcatggatactatcgagcttggcaacaacgaatctctggtrtgtggcgtgtttcccaaycaggacggcacgtttaccgcgatgacgtataccaaaagyaaaacgtttaaaaccgaagctgccgcgcatcgctggttagccagaaacgctaactgattagcgccagtaaaaacaggtttccacaggttaatttaccctgaaaagtcagngcataanncgaaagcgcacggcgagatccctttgcatataagtcttgtcgttaaatttcttcgaccgtgcgcttctggttgtggcaatccgcgaaatggcgcggcggtaagtatggcggggttatcccttcccccgttgaggacaccgggttgtcaggttgaccatacgcttaagtgacaaccccgctgcaacgccctctgttatcaattttctggtgacgtttggcggtatcagttttactccgtgrctgctctgccgccctttttaaagtgaattttgtgatgcngtgaatgcggctmagcgcacgcggaacagttaaaaccaaaaacagtgttatgggnggattcnctgtatccggcgttaattgttaactggttaacgtcacctggaggcaccaggcaccgcatcacaaaattcattgttgaggacgcgataatggaaacgttattaccaaacgttaatacgtctgaaggttgttttgatattggtgtcactatcagtaaccctgtatttactgaagatgccattaacaagagaaaacacgaacgggagttnnnnnnnnnnnnnnnnnnnnnnnnnnnnnnnnnnnnnnnnnnnnnnnnnnnnnatgctggcccgtttacgtccgatacaaaaaggatgctggcaatgaatacagcatttgcactnnntctgnnnnnnnnnnnnnnnnnnnnnnnnnnnnnnnnnatnncagtcagtgttcacaggacaatgcaggagtgtgtgactgcagcaaccgaacnnnnnnnnnnnnnnnnntgttanccggtcgataaagttattcnncagnnnnnnnnnnaaatcccggcaggtctttanaacagttccgtaataaacatccgatttcattcttatatgccagcaatggcagggatttgttcacccttaaatctgtaatgaggtnannnnnnnnnnnnnnnnnnnnnnnnnnnnnnnnnnnnnnacgaacaggcaataaaggaagaaggtgcngtcgctgtannnnnnnnnnnnnnnnnnnnnnnnnnnnnnnnnnnnnnnnttgtttgcgaggataaacccggtataccccgccctgccctcgattcctgggatgctgaatatatgcaggaaaaccgctgggatgaggagtcngcttcctttgtcccggtngagactgannnnnnnnnnnnnnnnnnnacttttgacaacctngcccctgaagtacagaacgctgtcatggttaagttcgacacatgtgaaaacatcactgttgatatggtgattagcgcacaggaattgttgcaggaagacatggcaacattcgacggccatatcgttgaagcgttgatgaaaatgccagaagttaacgctatgtatccggagcttaagctgcatgccatcgggtgggttaagcataaatgtaagcctggtgccaaatggcccgaaattcaggcagagatgcnnnnnnnnnnnnnnnnnnnnnnnnnnnnnnnnnnnnnnnngtgaacgcaaggaagccggaaaatacacgtctgttgttgatctcgcccgcgccagagccaatcaacagcacactgaaaattcaacaggaaaaatcaacccggtcattgctgccattcatcgcgaatacaagcagacatggaaaacactggatgacgaactggcctacgctctctggcctggtgatgtggatgccggaaacattgacggcagcatccatcgctgggnnnnnnnnnnnnnnnnnnnnnnnnnnnnnnnnnnnnnnnnnnnnnnnnnnnnnagactggaagcgtatctcggcatcnnnnnnnnnacagcctgatgcccttcgctacgaccgccagactatttttggccttntccgtgaacgtccgatcgacattcacaaagaccctgtggcactgaacaaatacattactgaatacctgactacaaagggcgtgtttgaagatgaaggaagaaatcagagcgcaactgatactctctcgtcgccagtaccagaaactgatgcagtggaaacggcaattccggacaacgaaaaaaccgaatgcaaagtggaagtcgaaccatctgtagagcgtgaggggccgttctacttcctcttcaccgacnnnnnnnncgaaaaatnngnncgcgcaaacaaactttctggtctggataaggcgnnnnnnnnnnnnnnnnnnnnnnnnnnnnnnnnnnnnnnnnnnnnnnnnnnnnnnnnnnnnnnnnnnnnnnnnnnnnnnnnnnnnnnnnnnnnnnnnnnnnnnnnnnnnnnnnnnnnnnnnnnnnnnnnnnnnnnnctgacgccgatgaactgcttgcagtatcgcgtggtgaatttgttgaggggannnncgnnnnnnatgatccnaaatgggtnaaggggnnnnnnnnnnnnnnnnnnnnnnnnnnnnnnnnnnnnnnnnnnnnnnnnnnnnnnnnnnnnnnnnnnnnnnnnnnnnnnnnnnnnnnnnnnnnnnnntcaaaacagcccaaatacgcaacaaaacgagccagaaacgaaacanccngaaccagtagtgcaacangaaccngaaannnnctgcaccgcctgcggtcagagcggtggcggcaactgccctgattgtggtgcggtgatgggcgacgcaacataccaggaaayattcgrtgaagagaatcagcctgaagttcaggaaaaagatccggaggaaatggaaggtactgcacatcagcacaaggagaacactggcggcaatcagcatcatgccagcgatagtgaaactggcgaggcgtcagatcccttaattnnnnnnnnnagtcatcataatctcacatccaccagcagagcggggattcatctgatgatcgaccttgaannnatgggaaaaaatccnnnngccccgattatctcaatagnnncaatannnnnnnnnnnnnnnnnnnnnnnnnnnnnnnnnnnnnnnnnnnnnnnnnnnnnnnnnnnnnnnnngnnctgnntacnnctggcggagtnnnnnnnnnnnnnnnnnnnnnnnnnnnnnnnnnnnnnnnnnnnnnnnnnnnnnnnnnnnnnnnnnnnnnnnnnnnnnnnnnnnnnnnnnnnnnnnnnnnnnnnnnnnnnnnnnnnnnnnnnnnnnnnnnnnnnnnnnnnnnnnnnnnnnnnnnnnnnnnnnnnnnnnnnnnnnnnnnnnnnnnnnnnnnnnnnnnnnnnnnnnnnnnnnnnnnnnnnnnnnnnnnnnnnnnnnnnnnnnnnnnnnnnnnnnnnnnnnnnnnnnnnnnnnnnccgtggcgttactacaacgatcgcgatgnncncacannnnnnnnnnnnnnnnnnnnnnnnnnnnnnnnnnnnnnnnnnnnnnnnnnnnnnnnnncagnnaaaatacgtttcaactatctggcaaaaactgatcccaagtcaggnnnnnnnnnnnnnnnnnnnnnnnnnnnnnnnnnnnnnnnnnnnnntcgatgagcgaagtaatcatgatcgtctctcctggcaaatgggtatccgaagagcagttaattnnnnnnnnnnnnnnnnnnnnnnnnnnnnnnnnnnnnnnnnnnnaaaaatcgtttatggaaggaagggaatataagcatgtcgctcatgacggtatgccatgggataacagtccatgcttttacaacctggaagaaattgatcgctggattgagcgccaggcatctgcaagaccaagacgnnnnnnnnnnnnnnnnnnnnnnnnnnnnnnnntnnnnnnnaatgagagaagctgaaatgaaatatccgacaggcgtggaaaaccatggagggaaattacgtatctggtttgtttataaaggtgtaagagtcagggannnnnnnnnnnnnnnnnnnnnnnnnnnnnnnnnnnnnnnnacaggcgcattgcaggtgagctgcgcgcctctgtttgttannnnnnnnnnnnnnnnnnnnnnnnnnnnnnnnnnnnnnnnnnnnttttcgactatgcaaaacagtttccctcctcacacaatctggaaaaatttggtgaggcccgacaagatttaaccataaaggaactggctgaaaaatnnnnnnnnnnnnnnnnnnnnnnnnnnnnnnnnnnnnnnnnnnnnnnnnnnnacgtcactcaacacgtaccgtgccgtcatcaaaaatattctgagcataatcggtgaaaaaaatcttgcctcntcgattaataaagaaannnnnnnnnnnnnnnnnnnnnnnnnnnnnnnnnnnnnnnnnnnnnnnnnnnnnntggataccagatccccaaaagtaantatattgtnnnnnnnnnnnnnnnnnnnnnnnnnnnnnnnnnnnnnnnnnnnnnnnnnnnnnnnnnnnnnnnttacatgacaaatctttacgccgtgttccagttcggtgttgataacggttacctgncagataanccgtttaagggganntnnccattaaaggaatcaagaaccattcctgatcctctttcncgggaggaattnatccgtcttnnnnnnnnnnnnnnnnnnnnnnnnnnnnnnnnnnnnnnnnnnnnnnnnnnnnnnnnnnnnaccgtcctcagtggtgatttttaatgtgacgaaattacgccccggacaggtaacaaaaacttcagcctttacgatcttcatgttcgattccttgcatcgcttgtcgtgatgcatgaaatctacgcaactgagctactaccatacaagtatgaagatcgaaaaaagccggagtgatnnnnnnnnnnnnnnnnnnnnnnnnnnnnnnnnnnnnnnnngcgtatatttgcgctgtgaatggttgacaaaagatgaaatagaataccttttgtcagnnnncacttcctcgtatcttattgataaaatggatttatgttcctacgtgcgcccccagcccacaacaatgatcaacatgccgcaaagcgcaatcaacgcccccgtccagtcataaagagtcagtttcacgccatccacaacgcgcagccacatcaacgccgtgcagacataaacgccaccataagccgcgtaaacacgcccactcgccgcaggatgcaacgttaacaaccagacaaacagcgccagtgaaatccccgccggaagcaacagccagatactggcgtttcgttttaaccacaaccagggcagaaagcatccaataatttcacacagcgcagtagcaaaaaatagtaacgttgttttaatcatctttgtcacttattgacatcatgtatagttatagggcgacataatatcatcaatataaacaccctcctggtacgttttgcgttcgcagtggatggtgtagaatcatctttaatcattcatacagggaatgaattatgaaaatcactctcagcaaacgaatcgacctgctcgcttttctgctgccttgcgcactggcattgagcacaactgttcatgccgaaactaacaaactggtgattgagtctggcgacagtgcacaaagccgccagcacgccgctatggaaaaagagcaatggaatgacacgggcaatctgcgccagaaagtgaataaacgcactgaaaaagagtgggatnnngccgacgccgcttttgataaccgcgataaatgcgagcaaagcgccaacatcaatgcctactgggagccaaatactttgcgctgcctggaccgtcgaactggccgcgttattaccccctaacctgttattgatttaaggaatgtaaggacacgttatgccaagcgcccacagtgttaagctacgcccgctggagcgtgaagatttacgctatgtacatcaactcgacaataacgccagtgtgatgcgttactggtttgaggaaccctacgaagcctttgttgaactctctgatctgtatgataagcatattcacgatcagagcgaacgacgctttgtggtggaatgtgnnnncgaaaaagccggtctggtggagttggtggaaattaaccatgtacatcgccgcgcannnnttcnnnnnnttatctccccggagtatcaggggaaaggtctggcaacccgtgccgccaaattagcaatggactatggcttcaccgttctcaatctctataagctgtatctgatcgttgataaagagaatgaaaaagcgattcacatttaccgcaagcttggcttttcggttgaaggtgaattgatgcacgagttctttattaatggtcaatatcgtaatgccattcgcatgtgtatattccagcatcagtatctggcagagcacaaaacaccgggtcagactctcctgaagccgaccgcacaatagcattaataataatcgatcgtatttttgatggtgtaaacccgttcgacggcgggttttactccttcatcaacaatgatcagctgacagcccaccggattggcgtgactgtcatattcacagctctgttttacattaccaactcgttgattattcagtaaagtaaccgctgtgtaatctaattttttgatcgggtccgttgatggcgtggcgctgacagataatgttttgtcgttacttttcgtggttttacccagtggataaccctgatcatcatagcgatattccatctgcatttgtttgctgctggctttaatcacgaagccattatcatcggtttcccaactcaccccggcagaaggtaattctgctagctggcattttccctgtaaacgtactctcttctccagcgtctcggcatcacggtaataattggcgtccagtaccagagcgaccacggtattattttccagatccagtaattcgagtgaatcaaaacagccttcttccgacaaagtccccgaaacacgtttcgtcacttcaccttgctcatccattaatgtctgagtgaaatcttttaccggaccacgcagcggatcaaaatcgaattcattagagaaactggccatctcaggagtaaatgaaagtgttacctctgtgcggtcacatcctgtgagtaatatcgcgagtaagcatggcagtaatttgtatttcacatcagtcaccagagagtagagatgattctcaatcatagtagcaaatacagtactttacacgtgaaatgctatgcttaaagaagttatcttcgcgttaggagcttatgatgaaactctcaacctgttatgccgcgcttctgctcgccctcgcctcacccgcggtactcgccgcgccgggatcctgtgagcgcatacaaagcgatatatcacagcgcattatcaataatggcgtacccgaaagcagcttcacgttaagtattgtacccaatgaccaagttgatcagcctgattcccaggtcgtcgggcattgcgctaatgatacgcataaaattctctacacccgcaccaccagcggtaacgtctctgctcccgcgcagtctacccaggatggcgcgcctgccgaaccgcagtaatacattatcgactacacgccggatacgacacatccggcgatttggacatacaacataatcccaccatattactcatacccttctattgatatggattaataattattaacccaaaatgggtagactccctctattgttannnnnnnnnnnnnnnnnnnnnnnaacttttatataacgataaagaacagggagtgagttatgtccaaaaatgaacgaatggtgggcatcagccgcagaacactcgttaaatctaccgcgataggttctctggcgctggctgcaggcggtttttctttgccgttcaccctgcgcagtgcagcggcagcagtacaacaggccagcgaacaagtggtctggggtgcctgttccgtcaactgtggtagccgctgtgcacttcgtctacatgttaaagataatgaagtggcctgggtggaaactgacaacaccggcagcgatgagtatggcaaccatcaggtacgcgcctgtttgcgcggtcgctccatccgccggcgtattaatcatcccgatcgcttgaattacccaatgaaacgcgtgggtaaacgcggtgaaggcaaattcgaacggattagctgggatgaagccctggatactatcgccagtagcctgaagaaaaccgtcgaacaatatggcaatgaggctgtatatattcagtactcttcggggatcgttggcggcaatatgacccgctcttcgccatcagcctcggcggtcaaacgcctgatgaactgctacggcggttcactcaaccagtatggctcctacagcactgcgcaaatttcctgtgccatgccctacacctacggcagtaatgatggcaacagcaccacggatattgaaaacagcaagctggtcgtgatgtttggtaacaacccggcagaaacccgcatgagcggcggtggcatcacttatcttcttgaaaaatcccgcgaaaaatcgaacgcaaaaatgattgttatcgatccgcgatataccgatacggctgctggtcgtgaagatgaatggcttcctattcgcccgggcaccgatgccgcgctggttgcgggtattgcctgggtattgattaacgaaaatctcgttgatcaaccttttctcgataaatactgcgtcggctatgacgaaaaaaccttacccgcagatgcacccaaaaatggtcactataaagcctatattcttggtgaaggtgacgataaaacagcgaaaacgccgcagtgggcttcgcaaattaccggtatcccggtggaccgtatcatcaaactggcgcgtgaaattggcacagcaaaacccgcttatatctgccagggctgggggccgcaacgccaggcaaacggcgagctgaccgcacgcgctattgctatgttgcctattctgacgggcaatgtcggcatcagcggcggaaatagtggcgcgcgtgaatcgacctataccattaccatagagcgcctgccggtgctggataatccggtcaaaacgtcaatttcctgcttcagctggacagatgctatcgatcatggcccacaaatgacggcaatccgcgacggtgtccggggcaaagataaactggatgtgcccattaagttcatctggaactacgcgggaaataccctggttaatcagcattctgacatcaacaaaacgcatgaaattctgcaggacgaatcgaaatgcgaaatgattgtggtcatcgaaaactttatgacctcatcggcaaaatatgncgacattctgctgccagacctgatgaccgttgagcaggaagatattattcctaacgactacgccggtaacatgggatatctcattttcctccagcctgtcaccagcgaaaaattcgaacgcaaaccgatttactggatcctgagtgaagtcgcgaaacgtcttggacctgacgtctatcaaaagttcactgaaggtcgcacgcaggaacaatggttacaacatctgtacgccaaaatgcttgccaaagatccggcgttaccgtcttacgacgaactgaaaaaaatgggtatctataagcgtaaagatcccaatggtcattttgtcgcctacaaagcatttcgtgacgaccccgaggcaaatccacttaaaacaccttccggtaagattgaaatttattccagcaagctggcggaaattgcccgtacctgggaactggaaaaagatgaagtgataagcccactgccagtttatgcctcaacctttgaaggctgggactcccctgaacgtagtacctttccactgcaactgtttggtttccattacaaatcccgtactcactcgacctacggcaacattgatgtcctgaaggctgcctgccgtcaggaggtgtggatcaaccctatagacgcacagaaatgtgggattgccaacggcgatatggtgcgggtgtataaccatcgtggcgaagttcggctaccagccaaagtgacaccacgcattctccctggggttagcgctatgggccagggagcctggcacgaggccaatatgtctggcgataaaatcgaccatggcggatgtgtgaatacgctaaccactctgcgcccttcaccactggcgaagggaaacccgcagcacacgaatctggtcgagatcgaaaaaatataacccactacaaccataaattctggcatgacattttgtttgaaaagcaataagtgagtaatgatgaaaatccataccacataggcgctcatgaaggctgaaatcagccgtagaagtctgatgaaaacctccgcacttggcagtcttgcgctggcaagcagtgctttcactctgccattttcccaaatggtccgagcggcagagacaccggtagaagagaaagcggtctggagttcctgcaccgttaactgcgggagccgctgtctgttacgtttgcatgtgaaagatgacaccgtgtactgggtggagtctgatacgacaggtgacgacgtctacggtaatcatcaggttcgtgcgtgtttacgcgggcgctctatccgccgacggatgaatcatcctgataggttgaaatatcccatgaagcgcgtcggcaagcgcggtgaaggtaaatttgaacggataagttgggacgaagccctggataccatcagtgataatcttcggcggatcctgaaagattacggcaatgaggctgtacatgtcctgtacggaacaggcgtagatggcggaaacatcaccaactcaaacgtcccgtaccgtctgatgaactcttgcggtggttttctcagtcgctatggcagctacagtaccgcacagatcagtgccgcaatgagttatatgttcggtgccaatgatggcaacagcccggatgatatcgccaatacgaaactggtcgttatgttcggaaataacccggcagaaacgcggatgagcggtggtggtgtcacttactacgtcgagcaagcccgcgaacgttcaaacgcacgcatgatcgtcatcgatccacgttataacgacacagctgccgggcgtgaagatgaatggctgcccattcgccctggcaccgatggcgcactggcctgtgcgattgcctgggtactgattactgaaaacatggtcgatcagccatttctcgacaaatattgtgttggttacgatgaaaaaacgctgcccgccaacgcaccacgtaacgcgcattataaagcctatattctgggcgaagggcctgacggcatagctaaaacgccggaatgggcagcaaaaatcaccagcatcccggcagaaaaaattatccagttggcacgagagatcggttcagcaaaacctgcttatatttgtcagggttgggggccacaacgacattccaacggcgagcaaacatnccgcgctattgccatgctttccgttctcaccggtaacgtcggcataaacggcggcaactcaggtgtacgcgaaggtagctgggatctgggggtagaatggttcccgatgctcgagaatcctgttaaaacgcagatttccgtctttacatggacagatgccatcgaccatggtacggaaatgaccgcgacccgtgatggtgttcgtggaaaagaaaaactggatgtccccatcaagtttttatggtgctacgccagtaacacattgatcaatcaacatggcgacatcaatcacaccaatgaggtgcttcaggatgacagcaagtgcgagatgattgttggcattgaccacttcatgacggcctcggctaagtattgcgatatcctgttgcccgacctgatgccaacagagcaagaagaccttatctctcatgaatctgcagggaatatgggctatgtgatcctcgcccaacccgcaacctcagcaaaatttgaacgcaaacccatctactggatgctgagtgaagtcgccaaacgcttaggaccggacgtttatcaaacctttactgaaggtcgcagtcagcatgaatggatcaaatatctccatgcgaaaacgaaggaacgtaaccctgagatgcccgactacgaggagatgaaaacgaccgggatctttaagaaaaaatgcccggaagaacantacgtcgctttccgcgcattccgtgaagatccacaggcaaacccgttgaaaacaccttcggggaaaatcgaaatttattctgaacgactggcgaagattgcagatacctgggaattgaaaaaagatgaaattattcatccccttcctgcgtataccccaggttttgatggctgggacgatcccctgcggaaaacctatccactgcagttaacgggcttccactacaaagcgcgtacccactccagctacggcaatattgatgtgttacagcaggcctgcccacaagaggtgtggatcaaccccattgatgctcaggctcgcggtatccgtcatggcgataccgtgcgggtatttaacaataatggagaaatgctgattgccgcaaaagtgactccgcgtattctgcctggcgttaccgccatcgggcaaggtgcgtggcttaaagcggatatgtttggtgaccgggtcgatcacggcggcagtatcaatattctgacctctcacngcccttcaccgctggnaaagggaaacccgtcgcacagcaatcttgtccagatcgaaaaggtttaaggagtagcccatgaccacacaatatggattttttatcgattccagccgctgtactggctgtaaaacctgcgaactggcgtgcaaagattttaaagatcttggcccggaagtcagtttccgccgtatttatgaatatgctggcggcgactggcaggaagataatggcgtctggcaccagaacgtgttcgcttattatctctccatctcctgtaaccattgcgatgaccccgcatgtacaaaagtctgccccagcggcgcaatgcataagcgtgaagatggctttgtggtggttgatgaagatgtttgtatcggctgccgctactgccacatggcttgtccgtacgnnnngncacagtacaatgctgaaaaagggcacatgacgaagtgcgatggttgttattcgcgcgtcgccgaggggaaacaacccatatgtgtcgaatcctgcccgctgcgtgcacttgagttcggtccaattgaagagctgcgccagaagcacggcactcttgctgccgtcgcgccactgccgcgcgcgcatttcacaaaacccaatatcgttatcaaacctaacgccaacagccgcccgaccggcgataccactggttatctggctaatccggaggaagtgtaaaatgggaaatggatggcatgaatggccactggttatctttaccgtattgggtcaatgcgtagtaggcgcgctgattgttagcggaattggctggttcgccgccaaaactgacgcagaccgtcagcacattgttcgtggcatgtttttcctctggctgttgatgggcatcgggtttattgcctctgtcatgcacctgggatcgccactgcgggcgtttaactcgctgaatcgaatcggagcttctggtctgagtaacgagattgctgccggttccatattttttgccgttggcggactatggtggctggtggcggtcatcggtaaaatgccgcaagcgttggggaaactctggttacttgtcagcatggcgctcggcgtcattttcgtctggatgatgacctgcgtgtatcaaatcgacactgtgccaacctggcataacggttacactacgctggctttcttcgtgacggtattgttgagtggtccaatacttgctgccgcaattctgcgggcagcccgcgttacatttaataccacaccatttgccatcattagcgttctggcgctgatcgcttgcgccggggtgattgtgctgcaaggtttgtctctgtcgtctattcactcatccgtgcaacaagccagcgcactggtaccagattacgcctccttacaggtctggcgtgtggtattgttatgcgcaggtctaggatgctggctttgtccgctcatacgtcgccgtgaacctcacgttgccggacttattctagggttaatcctcattcttggcggtgagatgatcgggcgtgtgctcttttatggcctgcacatgacggtaggaatggctattgcaggttaacaaattggtgcggggcaacccgcacatttcaggatgttaggaatgacccatttttcacagcaagataatttttctgtcgcggcgcgcgtgttgggcgcgctgttttattacgctccagagagtgctgaagccgcacctctggttgcggtactcaccagtgacggctgggaaactcagtggcctctaccagaagcgtcattagcgccnctggtgacggcttttcagacacagtgtgaagagactcacgcccaggcctggcagagtttgtttgtcggcccgtgggcactgccgtctccgccgtgggggtcggtctggctggatcgcgaatctntgctgtttggcgattcaacattggcacttcgtcagtggatgcgcgagaaaggcattcagtttgaaatgaagcaaaacgaaccggaagatcattttggttcactgctgttgatggctgcgtggttggcggagaatggtcgccagacagaatgcgaagaattgctggcatggcacctttttccctggtcaacacgttttcttgacgtttttatcgaaaaagcagaacaccctttctaccgtgcactgggtgaactggctcgcttaacgctggcgcaatggcaatcacaactgttaattcctgtcgcggttaaaccactctttcgataggatcaccgtaatattgccggatggngacgattacncgcgattcggcaacaatacgttacagtgtcacgttttttgtctcttaaagcacgcactgcttttgcagctggcctcttttgccgcaaaatagtcgcccgtgtttcattgcccatttctgctcatgcatcatctacacacctatccggatctgcgcactatgttccgccgtctgcttatcgcaacagtcgtcggtattctcgcggcctttgccgttgccgggtttcgtcatgcgatgctgctactggagtggttgttcctcaataatgactccggcagtctggtcaatgcagcgacaaacctttccccctggcgacggctgctaactccggcgctcggcggactggcggcgggtttgttgttgatgggctggcagaaatttacccagcaacgccctcatgcgccgaccgattacatggaagcgttgcaaaccgatggtcagtttgattacgcagcaagcctggttaaatcgcttgcctctctgctggtagtaaccagcggcagtgcaattggtcgcgaaggtgcgatgattcttttagctgcccttgccgcctcctgttttgcccaacgttttacgccacgccaggagtggaaattatggatcgcctgtggggccgnggcgggaatggctgcggcctatcgtgccccgcttgctggcagtttatttatagccgaagtgctgtttggcactatgatgttggcctctctcggcccggtgattatttccgccgtcgtggcattgctggttagcaatctgattaatcatagcgacgcgttactctacagcgtacaactctcagtgacggttcaggctcgtgactatgcgctgattatcagtacaggtgtgctggcaggtctgtgcggaccactgttgttaacgttaatgaacgcctgtcatcgtggatttgtgagtctcaaacttgcgccgccctggcaactggcactaggcgggttgatcgtgggtctgctttccctgttcacacctgcagtgtggggcaacggctatagcaccgtacaatcctttttaaccgccccgccactgttaatgatcattgccgggatcttcctttgtaaactgtgtgccgtgctggcgagtagcggttccggcgcacccggtggtgtctttacaccgacgctatttatcggtcttgccattggcatgttgtatggtcgtagtctgggattatggttccctgatggcgaagaaattacgcttttactcggattgaccgggatggcgacactgttggcggcaaccacgcacgcgccgattatgtcgacgttgatgatatgtgaaatgaccggggagtatcagctactccccggtttattgattgcctgcgtaattgcgtcggtaatctcgcggacgttacaccgtgactctatctaccgccagcacactgcgcagcatagctaagcggatgtattgccccagttcacgctgttcggcgcgcggcagataaggcagttcaccaatgagcggtgccggaagttttttaccgagcacatcaatgatttccgcataatgcgccagtcctgggttgattcggttagccacccagccaatgagcggcagcccgtcgttggcaatcgcctgagctgttagcagtgcatggttaatgcaaccttcctgaataccgacaaccatcaacaccggcagttgttcctgcaccacccattcagagagtggacgcaaatcattcatcagactacgccagccgccagtcccttctaccacgacatgatcgactttttcggtcaggtttgccaggccgtttgaaatgagggtgtaattgattgggcaactgtgcgccacgctactttcttcttcgcttaacgcgataggattaactgcttcataaggcagttcgatggttgaaacactctgcaacaccagggcatctttattacgcagcccttcgggtgtctctttgctccccttcgctacgggtttatatcccgcaaccgtttttccctgggaggctaacgcttgtagcaatgcgcgggaaaccaccgttttccctacagaagtgtctgtaccggtaataaagaaacgcttcagcatcactaactccaccgttatgcttcacaaatataaaccaggaaaataattaaccttgaaagtctaagttatgctttcctggcccaaattgagatagcgcaaattttggtagaacagttaaaaaatgttaaccctgcaacagacgaatcaacaaagaaccgttatacatcgcgtcttttaccagcgcagcccctgccatcgtgccctggttagaaaactgagtactctcaacgctaatgtgctgactatacgcaggaagggcctgctgacggatgctatctgagatgaccgggaagaggatatctgccgctttacttaacggtgagccaatcagtattttttgtgggttaaataaattcaccatgatggcaagaatgcgccctacatgcgcgcccaccccggtaatgatgtcttttgccagcagatcgccgcgcaatgccgcctgacacaatgagtccacggttaacggttgcccatgtaacatcgagctcatggattgattgagacgcagctgtgccagctcaagaatactgtccacactggcgatggtttcgaggcagccgtggttcccgcaataacagcgtttaccatatgggtctacctgtgtgtgacctatttccacgaggctactgctgcctgcgtgtagcagatgaccatcggtaatgacgcccgcccccacgttgtgatcgataaccacctgaatcacatcgcgcgccccgcgtgaggcaccaaacaaggcctctgccatcgtccatgcgctgatatcatgctgaatataaaccggaacgccggtatgctgctccagagcctcgccgagcggcatctcttttacatcctcgtagaacggcatgcgatgtacaatgccattttccgtatcaataattcccggcagggttatggcaatcgaagttagacgctcaagttttttctggtggcggataaaaaactgatcgatatgggaaatgatacgatccagcaatggcgagtcatcttttaacgccagttcctgcgactcttccaccaccagtttgctgctcagatcgcgcagagcaaggaaaatctccccgcgactaatgcgcagagaaagatagtgccaggcttcagtttcaaccaccagccccaccgccggacggccacggttccccgcttctttgatttccagctcttgcaccaggtgtgcttcgagcatctcacggacaattttagtgatactggcaggagccagctgcgccagacgggaaagatcgatacgcgagactggaccaagctgatcaatcaggcgataaaccgcgcccgcgttggtctgctttatttgatcaatgtgcccaggctggttttcagcaaccaccgcatactccctatattttcgcgctccgaaataatctgtaggctatggtgaagcacttcaatacgtgtcgtcaaatttttacttaggcatgtgattaacagcacatttttcgggctttttcgctgaaatttccctcacctgagagcattcagcagatgaatacgaaagttacgcgcagctggactttgttcatgatgtttcggccagaccaaccacatttcagaaaccgcatcctcttcagcaatcggcacccagcgcatttcgttgagctgaacacgtttaaatgacgcaggcaaaattgaaacacccagaccggcggaaaccagaccgatgatggtcattgcctcgcccacctcctgagtgatgacgggcgtcaaatggtaacgtcgcatcagcccgagaatatcgtcatacagccctgtcccgacgtgcggatcaaaaaagacaaagggttctttcgccagttcagccagcgttacattcgggttatttgccaggggatgatcgtgcgggatcatcgccataagcggttcatggacgatgactgcgtgttcaagcgtctccggtaacgctgtgttacgcagcaatcccatatccagcgttccttcaatgagcggagcgatttgctcgcgagtgttcatttcgcgggtttgtaaatggacatcgggataatctcggcgaaacagcgataacgtatcggacaccgcccgaataaaaggagccgacgaagtaaaaccaatgcgcaactcccccgcttcaccctgatgcagtctttcagcgcgagcggcagcgtcatccaccatagacaggatttgccgactatctgcaagaaactgttttcctgctgccgtcagcaatacactgcgattggttcgtgccagcagtcgggcaccaatttgttgctccagcgcctgaatctgctgacttagcggcggttgcgaaatattcaggcgggcagcggcgcgcccgaaatgcagctcttccgcaacagcaacaaagtaacgcagatgacgaagttcaatattcatatttaaaacatcttatttgagattattaatatattagacagaacaattcgattttcctaacctatgtataagcctgatccacaggcatatttagcaaggatttcaagtgagccgtactacaactgttgatggcgctccggcaagcgacactgacaagcaaagcatttctcagccaaatcaatttattaaacgcggtacgccgcaatttatgcgcgtcaccctggcgctgttctctgccggactggcaacatttgcacttctctattgtgtgcaacctatccttccggtgctttcgcaggagtttggcttaacgcccgcgaacagtagtatttcactgtccatttccacggcgatgttggctattggtttgctgtttactggccccctatccgatgccattggtcgcaaaccagtgatggtaacggcgctactattggcctccatttgtacgttactttcgacaatgatgaccagctggcacggcattttgattatgcgcgccttgattgggctttcgttaagtggcgtggcagctgttggcatgacttatcttagcgaggaaatccaccccagtttcgtggccttttcgatggggttgtatatcagcggcaactcaattggcgrcatgagcggacgcttaattagtggtgtcttcacggactttttcaactggcgaattgctctggcggctatcggttgtttcgcgctagcctcggcgttgatgttctggaaaatcctcccggaatcacgccattttcgcccgacttcgctgcgacctaagtcgttgtttatcaactttcgtctgcactggcgtgaccggggattaccgttattgttcgcanaaggctttttgctgatggggtcgttcgtcacgctgtttaattacatcggctatcggttgatgctctccccctggcatgtcagtcaggccgtggttggcttattatcgctggcttatttgaccggtacatggagctcacccaaagccggaaccatgaccacccgctatgggcgtggtccagtgatgttgttttcgacgggggttatgctgtttggtttactgatgaccttattcagctcgctgtggctgatctttgccggaatgttactcttctcagcaggattcttcgcagcccactcagttgccagcagctggatcggcccccgcgcaaaacgcgctaaaggccaggcctcctcgctgtatctgttcagttactatctggggtcgagtattgccgggacgctgggtggtgttttctggcataactatggctggaacggcgtcggcgcatttattgctctgatgctggtcattgctctgctggtcgggacgcgtttgcatcgtcgtctgcacgcctgaaaaataagtccggactgcggtaaatacccgtccggacttattgcctgctcaaaccaacgttaatagccatcctaaaatagacgaagcgccagccaattcccgcagcgcgtctagcgtcatcaggattataagtacccaaataaacggattcattttgctgtgtgtcatttattactgatgcgcagttattctaccgctttgtaagtagtaaaatagttaacccgatcaagactactattattggtagctaaattttccttaagtcacaatacgttattatcaacgctgtaatttattcagcgtttgtacatatcgttacacgctgaaaccaaccactcacggaagtctgccattcccagggatatagttatttcaacggccccgcagtggggttaaatgaaaaaacaaattgagggtatgacaatgaaaaaagtattagctctggttgttgccgctgctatgggtctgtcttctgccgcctttgctgcagagactgcgaccacacctgctccgactgcgacgaccaccaaagcagcgccggcgaaaactacacatcataaaaaacagcataaagcagcacctgcccagaaagcgcaggcggctaaaaagcatcataaaaatacgaaagctgaacagaaagccccagaacaaaaagcgcaggcagcgaagaaacacgccaagaaacacagccatcagcaaccggcaaaacctgctgcacaacccgcagcgtaagttttcaacagtaatgcnggcncgccccctcgcgcctgaaaattacggtgctaagcgggtaacgtttagcaccgcctttagcggagggtagtatggtgggccgttatcgctttgagttcattcttatcatccttattttatgcgcactgattgccgcccgtttttatctttcctgatcgtagttatctgattttactcccactttcatcccgtcccgtctatagtatttatgagggtttgcttttaataatcataattacccaccagagtgtgatatgcgtacaaccattgctgtagtgttgggtgcaattagtttgacgtctgcttttgtgtttgcagataaaccagacgttgccaaatcggcaaacgatgaggtcagcaccctgttttttggtcatgatgatcgtgtgccagtgaatgacacgacccaatcaccgtgggatgcggttgggcaactggaaacggccagcggcaatttatgtacggcgacgctgattgcacccaatctggcattaacggcaggacactgtttattgacgccaccaaagggtaaagccgataaagcagtggcgctgcgttttgtgtcaaataaaggtctttggcgctatgacatccacgacatagaaggccgcgttgatccgacactgggaaagcggttaaaagcagatggggatggttggattgtacctcccgcagccgcgccgtgggacttcggattgattgtgctacgtaatcccccttctggcattacgccgttgccgttatttgagggagataaagccgcgcttaccgccgcattaaaagcggcaggtcgtaaagtgactcaggcaggataccctgaagatcatctcgatacgttgtacagtcatcaaaactgtgaagtgactggctgggcgcaaacgtcggtgatgtcacatcagtgcgataccttgccgggtgacagcggttcgcctctgatgttgcataccgatgacggctggcaatcaattggggtgcaaagttcggctcctgccgcgaaagatcgctggcgcgccgataaccgggccatttctgttaccggttttcgcgacaagctggatcaactgtcgcaaaaataatnttcaaacgctgcccgacagcgcgggcagcgtcttcatcaggcaagtttcaccatgatcattccagccaacagcaagaccaggccaatccagcctttacgatttaaccgttgaccaaacaagatccaacctgcggctaacgtggcggcaataccaaacccgccccacaatgcataagcgacagacaagtcgatccctttaacggcctgagaaagcgcactaaaggcagccagcaccgccgccagggagagcaagccaaatattttgcgacgaaagccgtcagaaaatttcaaaaagacgttagcaacgatttccagcacgattgccaatgccagccaggcggcgtgaacccattcaaactgcgccatggttcacctccagttcaggtttacgtgctttacgggtacctgatttgatcaacactatcccggcgaccagggtggttaacccggcaattttcatcagcgataaactttcgtcgaataacaaaacgctaaacaaggtaataaataaaataccgataccttcccacagcgcataagccacacctaaggctatttttttaacagcgaaagagagaaatatatacgacagagaaatcatcaccagcattaaaataaagccgccatttccctcactgacgctcgcccatttcatagacagcgtaccggtaatttctgtagcaatagccagacctaataaaatccaataaatatacattgtccttctcctgcaagagaattattttannnntcgcttaattcagcgaaaccaaagtaaagtggtcaagccccgcgtatagggcaagcttaggcagaagaaaggactaaagcgcgttgcgccagtgctgctcacctacgagcaagatagtggatgaggtacgaagatgggtaaatgtagaaaataacgtcctgaacaaattgtccataatattacaattatccgcagtgttgcttctcgtcatcgcggatgataattgtcctcggtagttgaacacncctgatttgtatcatagcttaagaattaactcaaaatattttcacttctttacctgagcggtttgattttcgttatgatgacggagcgaaaaagacattattattagcaaaggaagaaaaaacggggacaagcatggcaaagccgatcatcacgctcaatggcctaaaaatcgtcattatgttgggaatgctggtcattattctctgcggtatccgttttgccgccgagatcatcgtgccgtttattctcgcattatttattgctgttattcttaacccgctggtgcaacacatggtccgctggcgtgtgccgcgtgtactggcagtgtcgattttgatgaccatcatcgtgatggctatggtgttgctgttagcttatctgggttccacgctcaacgagttgacgcggacgttaccgcaatatcgcaactctattatgacgccgctgcaagctcttgagccgttgttgcaacgcgtagggattgacgtctcagttgaccaactggcgcattacattgatccgaacgcggcgatgacgttgctcaccaacttattgacgcagttatctaatgccatgtcatcaatatttttattgctgctgacggtgctgtttatgctgctcgaagtgccacaattgcccggaaaatttaagcaaatgatggcgcgtccggttgaagggatggcggcgattcagcgtgcgattgacagtgtgtctcattatctggtgctgaaaacagccatcagcatcatcaccggcctggtcgcatgggcgatgctcgccgccctngatgttcgcttcgcttttgtctggggattgctggcctttgcgcttaattacatccctaatattggttcagttctcgcggcaatcccccctattgctcaggtactggtgtttaatggcttctacgaagcgttgttggtgctggcgggatatctgctgattaatctggtcttcggcaatattctggagccacgcatcatggggcgtgggctgggactttccacattggtggtatttttgtcgttgattttttggggatggttgttaggaccggtgggtatgctgctttccgtgccgttaacaattattgtcaaaattgcgcttgaacaaacagcgggaggtcaaagcatcgccgttctgttaagcgatctcaataaagagtgacggcctccgcagaggccgtcagggttacagagctttcaggattgcatccacgctggctttggcgtcaccaaacagcatgtgggtgttttccttgaagaacagcgggttttgcacaccagcatagccagtgttcatcgaacgtttaaagacaatcacgttctgcgctttccacacttccagcacaggcataccagcaatcggactcttcggatcatcctgcgccgccgggttaaccgtatcgttagcaccaatcaccagtacggtatcggtatcagcaaagtcatcgttgatctcgtccatttccagcacgatgtcatacggtacttttgcttcagccagcaatacgttcatatgtccaggcaaacgccccgcaaccgggtggataccgaaacgcacgttgataccacgagcgcgcagtttctcggtaatttcagcgacaggatattgcgcctgcgcgactgccatgccgtaccccggagtaatgatcactgaatgggagtttttcaacagttccgctgtctcttctgcggtgatttcgcggtgctcacccacttcctgatcatcgccagtagaagagccgtcggtgccgaaaccacccgcaataacgctgataaaggaacggttcatcgccttacacataatgtaagaaaggatagcccccgaggaaccgaccagcgcaccggtcacaatcagcaggtcgttgctgagcataaagcccgcagccgcagccgcccagccggagtacgagttcagcatcgacaccaccaccggcatatctgcaccaccgatggaggcgactaaatgccagccaaataccagcgcaatggcggtcattattagcaatgccagcacttgcaggccgacgctatccgtgcgaacaaatactatcagcagcaggaaggaaacgaccagagctgccaggttcattttgtgacggtttggcagcatcaacggtttagacgaaattttgccacacagtttgccgaacgccaccaccgaacccgtgaacgttaccgccccgatgaagataccgagaaacacttccgtcaggtgaatattgaccagaatcggtgccattcccgcgtcatgatgcagatagctgttaaagccaaccagcactgccgccagacccacgaagctatgcaggatcgccaccagttctggcatttcggtcatttcaactttcttcgccagacggataccaattgccccaccaatgaccatcgccagcaagatccagccaacgttacccgtatccggtccaaaaatggtggcgattagcgcaatcgccatcccggcgataccgaagttgttaccctggcgagacgtttcatgtttcgaaagcccggccagactgaagataaacaggatcgcggcaacaatgtatgcagctgtaactaatcctccagacatatgttaccccttaatttttgcggaacattttcagcatgcgctgagtcacggtgaagccaccgaaaatattaatgctggctataagcaccgcgataaaactaaggaagctaacccagccgccctggccaatctgcaacagtgctccgacaacaataatccctgaaatcgcgttggtgaccgacatcaacggtgtatgcagcgcgtgcgatacgttccacaccacgtaataaccgacaacgcaggccagcgcgaaaacggtgaagtgcccaagaaactctttcggcgcaacgcttgccagccagccgaaaaggatgattgccagcgccatcaacgcgtatttacgccacggtgaacaggcacatttttcctcagttttcacttccggtgccgctttttgtgccacctgcggctgagctgatacctgaatcggcggtgccggccaggtaatttcgcccgcacggatcacagtcacgccgcgaatcaccacatcatcaaaatcaacagtgatgttaccgtttttctctttgcacaacagtttcagcagattaacgaggttagtgccgtaaagctgtgaggattgcgtcggcagacggcccggaagatcggtatagccaatcactttgacaccattttccgtagtgaagatttcacccggcacggtgtattcacagttgccgccgttttgggctgccaggtcgacaatcacactgcccgccttcatggagtcaaccatttcacgggtaattagcttcggcgctggtttgcctggaataagcgcggtggtgacaatgatatcgacctcttttgcctgggcggcaaagagttccatttccgctttgatgaacgcgtccgacatcactttggcatagccatcgccgctgcccgcttcctctttaaaatccagctcgaggaattccgcgcccatactttgaacttgttctttcacttccgggcgggtgtcgaatgcacgcacaatcgcgccgagactgtttgctgcgccaatggcggccagacctgcaacacccgcaccaatcaccatcacttttgccggtggcactttcccggccgcagtaatttgcccggtaaagaagcacccaaattcatgtgccgcttcaacaatggcgcgataaccggcgatattcgccatcgagcttagtgcgtccagcgattgtgcgcgtgagatacgcggcacagagtccatcgccatcacggtcacgttacgttccgcaagtttttgcattaattccggattctgcgcaggccagataaaactcaccagcgttgtcccaggattcagtaacgcaatttcatcatctaacggcgcattgaccttcagaatgatctctgactgccagacgctattcccttctacaatttcagcgcccgcttgcacaaacgctttatcgtcaaaacttgccagttgacccgcgccgctctctaccgcgacggtaaaccccagtttcagcagctgttccactgtttttggcgttgctgcaacacgggtttcattggttaaccgttctcttggtatgccaattcgcatgatattcccttccatcggttttattgatgatggtttgcctgtgtcaggagccacacaagccgctcatgtacgagctaaatgttactccgttaaaataaattagtaacaaacgccctataacgtactgaaaattatgcctgtgatctagcgccaaaaatcagtatttcggcgtgaactcgcaaaatattaacgattcagccgtgatagtgggataaacaccttagaacgccggataaagactgataattgtcttcgacggtcgggtaaaacgagacatcgccccggcacgaatcactacttaacattaaattaacttatacaattcagttgcttcagtagtaatgatgctgatacggctgttttttaagcatagacggtcatttgagcaggattaaaattggcttaaggaatgtgatatgaaaaatgacgcagacagttacaccgtttaaatgcaataatcagccacgtttctcgttaataacaataccagtacctggtttgcgcaaggcgaaggattatttttatgaagcttaagaacaccctcctggcgtcggcactgctttctgctacggcattctccgttaacgcagcaacagaactgacaccggagcaagcggcagcggttaaaccttttgaccgtgtagtggttaccggtcgttttaatgctattggcgaagcggtgaaagccgtttctcgtcgcgcagataaagaaggtgccgcctctttttatgttgtcgacacttctgattttggtaacagcggtaactggcgtgtggtcgctgacctctataaagccgatgctgaaaaagcagaagaaacaagtaatcgcgtaattaacggtgttgtcgaactgccgaaagatcaggctgttctgattgaaccgtttgacacggtcaccgtccagggcttctatcgtagccagccagaagtcaatgatgccatcaccaaagcggcaaaagcgaaaggtgcctactctttctacatcgttcgtcaaatcgatgccaaccagggcggcaaccagcgtattactgcattcatctataaaaaagatgctaagaaacgtatcgtccagagcccggatgtgatcccggcagattccgaagcaggacgtgcagctctggctgccggtggcgaagccgcgaagaaagttgagatcccgggtgttgcgactaccgcatcaccaagttctgaagtcggtcgcttctttgaaacccagtcatcaaaaggcgggcgttacactgtcacgcttccggatggcactaaagtcgaagaactgaacaaagcgacagcagcgatgatggtcccgttcgacagcatcaaattctctggcaactacggcaacatgaccgaagtctcctatcaggttgcgaaacgagccgcgaagaaaggtgctaaatattaccacatcacccgccagtggcaggaacgtggtaataacctgaccgtcagtgcagatctgtataaataactattcagttnctcttataaggcggcttgatgccgcctttcgcatttttagtcacaaatttccccgcgaccattgcatgcagacacatctcttcgtaaaatcccgcgcttcagtggcaaactccatttttatgcgttttgccctaatatttattcttcttatcacgttttaatcactggatatcgatggaaaagaaactgggactgagcgcactcaccgcgctggtattaagctcaatgctgggcgcgggtgttttcagtctgccgcanaatatggcggcagttgccagcccggcagcactgctcatcggctggggtattactggcgctggcattttattgctggcctttgccatgctgatcctcacgcgcattcgtcccgaacttgacggcggtatctttacctatgcccgcgaagggtttggcgagctaatcggcttttgttccgcatggggatactggctgtgcgcagtcatcgccaacgtctcctatctggtgatcattttttccgcgttaagcttttttacggacacgccggaattgcgcctgtttggcgatggtaatacctggcaatcgatagtcggtgcatcggctttattgtggattgttcactttttgatcctgcgcggggtgcaaaccgctgccagcattaacctggtggcgacactggcaaaattgttgccgctgggtctgtttgttgtgctggcgatgatgatgttcaaactggatatcttcaagctcgacttcaccggacttgcacttggcgtacctgtttgggaacaggtgaaaaacaccatgctgatcaccctgtgggttttcattggtgtggaaggtgccgtggttgtttctgcgcgtgcgcgtaataaacgtgatgttggcaaagcgacactgctggcggttctctccgctctgggcgtttacttgctggtaacgctgctttcgctgggagtggtggcacgtcctgaactggctgaaattcgtaacccgtcaatggccggtctgatggtggaaatgatgggaccgtggggcgaaatcatcatcgctgccggtttgatcgtttccgtttgcggcgcgtacttaagctggaccatcatggcggcagaagttccgttcctggctgccactcataaagcattcccacgcatttttgcgcgccagaacgcacaagctgcgccatccgcctcactgtggttgacaaacatctgcgtgcaaatttgtctggtactcatctggctgaccggttccgattacaacacgttgctgaccatcgcctcagaaatgattctggtgccctatttcctggtcggcgcgttcttgctgaaaatcgcaacccgtccactgcataaagcggtaggtgtcggtgcctgcatttatggcttatggttattgtacgcctctggtccaatgcacttgctgttatccgttgttctgtatgcaccggggctgctggttttcctgtatgcgcgcaaaacgcatacacatgataatgtactgaaccgtcaggaaatggtgctgattggcatgctgttaattgcctcagttccggcgacctggatgctggtgggataacgttcatcccatcgttggatagcaaaggagataacgatgggtaaaacccagcccttgccaatattaattactggcggaggtcgtcgcatcggcctcgccctcgcatggcatttcattaatcaaaagcaaccggtgattgtcagctatcggacacactatccagccattgatggactgattaatgcaggtgcgcagtgtattcaggctgatttttcgaccaacgacggtgtgatggcgtttgccgatgaagtactaaaaagcacccatggtctgcgtgctattttgcataacgccagtgcgtggatggcggaaaaaccgggtgcgccactggccgacgtactggcttgcatgatgcagatccacgttaataccccatacctgctcaaccatgcgctggaaagattactgcgtgggcacggacacgccgccagcgatatcattcactttaccgattatgtggtggagcgcggtagcgacaaacatattgcgtatgctgcaagcaaagcggcactggataatatgacccgctcgtttgcccgcaagctggcaccggaagtgaaagtgaattctattgcgccatcgctgatcctgtttaatgaacatgatgatgccgaatatcgacaacaggcgctgaataaatcattgatgaaaaccgcgcctggcgagaaagaagtgatcgacctggtcgattacttacttaccagttgctttgtcaccggacgcagtttcccacttgatggcggtcgtcatctgcgttaatgcagctttatccagcatataatcaacacccatgcgcttatcccccaacacgcaacagaaccaacaaaagcggcgggcaagcgcatcattccggtgaaataccacagcgacaccaggtaaacaaaatagggaataatcgaccacatactaaaaatgatggttgcgcgtaaggcttcaatgccgcgttcgctggcaacaatataatgcgcgataagcgcaaaggtcgggaaaagtggaatcagcccggcgatataataatttttcgtttttgctaaaacaccaatcaacagcactaccagcgcaccgagcgcggctttgattaccagccccatctttttaccttaacacttccataacaagtcatcagtagaatacctgatgaaaacttgtttagaaacgattgatagtaagtaaaaacagcgcggtgtattgtgacgtttttatatctaccgtgaatgttatgaacactatcgtatttgtggaagatgatgcggaagtcggttcactgattgccgcgtacctggcaaaacatgatatgcaggttaccgtagagccgcgcggcgaccaggccgaagaaaccattttgcgagaaaatccggatttggtgttactcgacatcatgctaccaggcaaggacggcatgaccatttgtcgtgatttacgcgcaaagtggtccggaccgattgttcttctaacctctctcgatagcgatatgaaccacatcctggcactggaaatgggtgcctgcgactatattctcaaaacgacgccccctgctgttttgttagcgcgtttacgtttgcatttgcgtcagaatgagcaagccacgctgaccaaaggtcttcaggaaacgtcactgactccctacaaagccctgcatttcggcacgttgaccatcgatcctatcaaccgcgtagtcaccctggctaacactgaaatctcgctctcgacagctgatttcgaattattgtgggaattagctacccatgccgggcaaatcatggaccgcgatgcattgctgaaaaatttacgcggcgtcagttatgacggcctggatcgtagcgtggacgtggctatttcgcggttaagaaaaaaactgctcgataacgccgctgaaccttatcgcattaaaactgtgcgtaacaaaggctatctttttgcgcctcatgcatgggaataagcgatgaaaaaactgtttatccagttttacctgttattgtttgtctgcttccttgtgatgtctctgctggttgggttggtgtacaaatttaccgccgaacgcgcgggcaaacagtcgctggatgatttgatgaacagttcgctgtatctgatgcgcagcgaattgcgtgagatccccccacatgactggggtaagacgctgaaagagatggatttaaatctctctttcgatctgcgagtcgagccactgagtaaataccatcttgatgatatttccatgcaccggctgcgtggcggcgaaattgtcgccctggacgatcagtacacttttttgcagcgtatcccgcgcagccactacgtgctggcagttggtcctgttccttatctttattatctccatcagatgcgattgctggatatcgccctgatcgcttttattgctatttccctcgcctttccggtgtttatctggatgcgtccgcactggcaggatatgttaaaactggaagcagcggcgcaacgatttggcgatgggcatctcaatgaacgtatccactttgatgagggttcgagctttgaacgacttggtatcgcatttaaccagatggcggacaatatcaacgccttgattgccagcaaaaaacagcttattgacggtatcgctcacgaactgcgaacaccgttagtgcgcctgcgttatcgactggagatgagcgataacctgagcgccgccgaatcccaggcgttgaatcgtgatatcagtcaacttgaagctttaattgaagagctgctgacttatgcccgactcgatcgcccacaaaacgagcttcatcttagcgaaccagacctgccgttgtggctgtcaacgcatctggcagatattcaggcagtaacgcccgataaaacggtacggataaaaacgctcatgcaaggccattatgcggcgttggatatgcgcttaatggagcgcgtgctggataatttgctcaataatgccctgcgctactgccattcaacggttgaaaccagcctgctactgtcggggaatagagcgacattaattgttgaggatgatggcccagggattgccccagaaaaccgcgaacatatctttgaaccttttgttcgcctcgatcccagccgggatcgctcaaccggcggctgcgggctggggctggcaattgtccactctatagcactggcaatgggcggtacggttaattgtgacaccagcgaactgggtggtgcccgcttctcgtttagctggccgttatggcataacatcccgcaatttacctctgcttgacactacgcgcacggtggtcaagtcaccaccactgtgctataaattaaggatgttgtaactaannnnggttaatattatggcgcgttacgatctcgtagaccgactcaacactacttttcgccagatggaacaagagctggctgcatttgccgctcatcttgagcaacacaagctattggttgcccgcgtgttctctttgccggaggtaaaaaaagaggatgagcataatccgcttaatcgtattgaggtgaaacaacatctcggcaacgacgcgcagtcgcaggcgttgcgtcatttccgtcatttatttattcaacaacagtccgaaaatcgcagcagcaaagcagctgtccgtctgcctggcgtgttgtgttaccaggtcgataacctttcgcaagcagcgttggtcagtcatattcagcacatcaataaactcaagaccacgttcgagcatatcgtcacggttgaatcagaactccccaccgcggcacgttttgaatgggtgcatcgtcatttgccggggctgatcacccttaatgcttaccgcacgctcaccgttctgcacgatcccgccactttacgctttggttgggctaataaacatatcattaagaatttgcatcgtgatgaagtcctggcacagctggaaaaaagcctgaaatcaccacgcagtgtcgcaccgtggacgcgcgaggagtggcaaagaaaactggagcgagagtatcaggatatcgctgccctgccacagaatgcgaagttaaaaatcaaacgtccggtgaaggtgcagccgattgcccgcgtctggtacaaaggagatcaaaaacaagtccaacacgcctgccctacaccgctgattgcactgattaatcgggataatggtgcgggcgtgccggacgttggtgagttgttaaattacgatgccgacaatgtgcagcaccgttataaacctcaggcgcagccgcttcgtttgatcattccacggctgcacctgtatgttgcagattaacgcccggctttcatactgccgaccatctgttctggccgtacccagctgtcaaactcggcttcgctaagataccccagcgcaagggccgcagcttttaaggtcagcccttctttatgcgcttttttggcgatctccgcggctttgtcataaccaatgtgggtgttaagcgcagtcaccagcatcagcgattcattgagtaattgattgattcgctcacgattcggttcaatacccactgngcagtgtttgttaaaactttccatgccatctgccagcaagcgcaccgattgcaggaaattgtggatcaccattggacggaagacgttcagttcaaagttaccggaagcgccccccatgttgatcgccacgtcgttccccatcacctgacagcagagcatggttaatgcctcacactgtgttgggttcactttccccggcatgattgagctgcccggctcattttccgggattgagatttcaccaattccgcagcgcgggccagaggccagccagcggacatcattggcgattttcatcagtgacgcagccaaccctttcaacgcgccgtgcgcctgaaccagggcatcacaggtcgccagcgcttcaaatttgttcggcgcggtaacaaacggtgcacaggtaatgactgccagttcatctgctacgcgacgcgcatactccggatgggtatttagtccagtacccaccgctgtaccgccaagagccagttccgctacgtgaggcaggctgtattcgatatgtttgagattatgctcgagcatcgctacccagccggaaatctcctgccccagtgttagcggggtggcgtcctgcaagtgggttcgaccgatttttacgatatcggcaaatgcacgcgatttttcactcagcgtctgtgtcagggttttaagctgcggaatgagttgcttgcgcagcgccagcagcgccgcaacgtgcatcgccgtcggaaagacatcgttggaactttggcttttgttcacgtcgtcgttagggtgaactttacgttccatcccgcgcacgccgccgagtaattcactggcccggttagccagcacttcattcatgttcatgttactttgcgtgccggagccggtctgccagatagccagcgggaattcgtcgtcatgctgtcctgccagtacttcatccgccgcctgccgaatggcgctcgctttctcttcagacaacaagcctaaatcttcattaacttttgccgctgcgcgcttggttagcgccagcgcatgaatcagtgaggtgggcattttctccgtcgaaatgcggaaatgctccagcgagcgttgagtttgtgcgccccacagcttatctgccgggacatcaatcgcccccatcgaatctttttcgctgcgtactgtattcatggcctactcctcacctgattaattttttctttctgttttgctttcgttaagtaacttttagctcactcattatttactatttgataacaaatgtttggtctttcgtgccatgtaaaaaaaccgccccgaagggcggctctgtttatttcacacagcgggtgcattgtgtgagttgtatctgctggaagaagtcatttcctttatcatccacaaggataaacgccgggaaatcttccacttcaattttccagatggcttccattcccagttccggatattcaacacattccaggctcttaatacttccctgcgccaatacagcggccggaccaccgatactgccaaggtagaagccaccgtgttttttacaggcatccgtcacctgctggctgcggttgcctttcgccagcatgatcatacttccgcccagcgcttgcagttgatcgacataagaatccatccgtccggcggtcgttgggccaagagaaccggaggcataaccttccggcgttttggccggacccgcgtagtaaatcggatgatctttgatgtactgcggcagcccttcaccgttatccatccgctctttcagtttggcgtgagcaatatcacgaccgacgataatcgtgccgttaagcgataagcgtgtagaaacgggatactgcgacaactgtgcgaggatctctttcatcggacggttaaggtcaacgcgcaccgcttcgccttctcccgctttgcgcagctcttccgggatatatttgcctggattatgttccagtttttcgatccagatcccctgacggttgatcttcgctttgatattacggtcagcagaacaggagacgcccataccgaccgggcaggatgcgccgtgacgtggcaggcgaatcacgcggatgtcgtgagcgaagtatttaccgccaaactgcgcacccagaccaagattttgcgcttcgatcagcaattctttttccaattccacatcgcggaacgcctgaccgtgctcattcccttccgttggcagttcatcatagtatttcgcggaagccagtttcaccgttttaaggttcgtttctgcagaagttccaccaataacgaacgcaatatgatacggaggacaggccgccgtacccagcgtgcgcatcttctcaaccaggtaatttttcagtttccccggcgtcagtaacgctttggtttcctgatagagatacgtcttgtttgccgaaccaccacctttggcgatacagaggaatttgtattcgtcgccatcaacggcataaagatcgatctgcgctggcagattggtgccggtattcacttctttatacatatccagcggcgcgttttgcgagtagngcagattatcttcgatataagtgttatagacaccgcgcgccagcgccgcttcatcaccaccaccggtccatacacgctgcccttttttaccaacaataatcgcggtgccggtatcctgacaggttggcagaacgcctttcgccgcgatgtcggagttacgcaggaattgcagcgccacatatttatcattttcgctggcctccgggtcacgcagaatgtcggccacctgttgttggtgcgccggacgcagcatgaacgacgcatcatgaaacgcctggcgcgccaacagagttaacgcttcgggtgcgactttcaaaatctcctgcccttcaaattcagataagctaacgtgttcgctggttagcaggtaatactcagtatcatcttttttgagtggaaaaggagcctgataatgaaagggtttgtttgacattgttttctcacttactgcctggtttggttatgctctgggcgggtgttccgttgccctgttaaaagcgagtaacaatatcctacgcacttttttaacaaaaactgagactagtacgactttttgcggctccaggttacttcccgtaggattcttgctttaatagcgggattaatttccacattaaaacagggattgatcatgcaaaaactcattaactcagtgcaaaactatgcctggggcagcaaaacggcgttgactgaactttatggtatggaaaatccgtccagccagccgatggccgagctgtggatgggcgcacatccgaaaagcagttcacgagtgcagaatgccgccggagatatcgtttcactgcgtgatgtgattgagagtgataaatcgactctgctcggagaggccgttgccaaacgctttggcgaactgcctttcctgttcaaagtattatgcgcagcacagccactctccattcaggttcatccaaacaaacacaagtctgaaatcggttttgccaaagaaaatgccgcaggtatcccgatggatgccgccgagcgtaactataaagatcctaaccacaagccggagctggtttttgcgctgacgcctttccttgcgatgaacgcgtttcgtgaattttccgagattgtctccctactccagccggtcgcaggtgcacatccggcgattgctcactttttacaacagcctgatgccgaacgtttaagcgaactgttcgccagcctgttgaatatgcagggtgaagaaaaatcccgcgcnnnnnnnnnnttaaaatcggcgctcgacagtcagcagggtgaaccgtggcaaacgattcgtttaatttctgaattttacccggatgacagcggcctgttctctccgctgttgctgaatgtggtgaaattgaatcctggcgaagcgatgttcctgttcgctgaaacaccgcacgcttacctgcaaggcgtggcgctggaagtgatggcaaactccgataacgtgctgcgtgcgggtctgacgcctaaatacattgatattccggaactggttgccaatgtgaagttcgaagccaaaccggctaaccagttgttgacccagccggtgaaacaaggtgcagaactggacttcccgattcctgttgatgattttgccttctcgctgcatgaccttagtgataaagaaaccaccattagccagcagagtgccgccattttgttctgcgtcgaaggcgatgcaacgttgtggaaaggttctcagcagttacagcttaaaccgggtgaatcagcgtttattgccgccaacgaatcaccggtgactgtcaaaggccacggccgtttagcacgggtttacaacaagctgtaagagcttactgaaaaaattaacatctcttgctaagcttattaaaggcttataacaccttcaggcggccagtccgcctgatttcattttatggataatcattatgaataaatcgctggtagcggtaggcgtcattgttgcgctaggcgtagtctggacaggcggcgcatggtatacaggcaagaagattgaaacccatctcgaagacatggtcgcgcaggcgaacgcgcaactcaaactgaccgctcctgaatccaacctggaagtgagttatcaaaactatcatcgcggcgtattcagcagtcagctgcaactgttggtgaaacccattgccggaaaagaaaatccgtggattaaaagcggtcagagcgtcatcttcaacgaatcggttgatcatggtcccttcccccttgcccagcttaaaaaactgaacctgatcccgtcgatggcatcaattcaaaccacgctggttaataacgaagtaagcaaaccactgtttgatatggcaaaaggtgaaacgccttttgagattaactcgcgcattggttacagcggtgattccagttccgatatttcgctcaagccactgaattacgagcaaaaggatgaaaaagtcgcctttagcggcggcgagttccagttaaatgcggacagagacggcaaagctatctccctttccggggaggcgcaaagtggtcggatagacgcggttaacgaatacaaccagaaagtacagttgacctttaataatctgaaaaccgacggttccagcacgctggcaagttttggtgagcgcgtaggaaaccaaaaactgtcactggaaaaaatgaccatttcagtggaaggcaaagaactggcactgctggaaggcatggagatcagcggtaaatcggatctggtcaatgacggtaaaacgatcaatagccaactggattactcgctaaacagcctgaaggtacagaatcaggatctgggcagcggcaagctgactttaaaagtcggccaaattgatggcgaagcctggcatcagtttagccagcaatataacgcgcaaactcaggcgctgctggcacagccagaaattgccaacaatcccgaactttatcaggagaaagtgacggaagccttctttagcgccctgccgctgatgttgaaaggcgatccggtgattactatcgcgccgctaagctggaaaaacagtcagggtgaaagtgcgctgaatctgtcgctgttcctgaaagatccggcaacgactaaagaagcgccgcaaacgctggcgcaggaagtagatcgttcggttaaatctctggatgcgaaactgaccattccggtggatatggcaactgagttgatgactcaggtagcgaagctggaaggttatcaggaagatcaagcgaaaaaactggcgaaacagcaagttgaaggtgcatcagcaatggggcagatgttccgtctgaccaccttgcaggacaataccatcaccaccagcctgcaatatactaacggtcagataacgttaaacgggcagaaaatgccactggaagatttcgttggtatgtttgcaatgccggcattaaatgttccggtcgtacccgctattccgcagcagtaattcacagccaaaacgccggagatttttctctccggcgttattttttacttcagcataaagtcatactgaatactcattttcacatcccagtaattcaggcgatcgcccagcgtactgccatcgcgcttttcccgccctttatcggcagcaagaaagaaattcatcccttgtaacggcccttcgctgacccgatagttcataccacctaagatacccgcgccttcaatccgcacatctcgtttactggattcatagccgcgagtcacaatcggtgcaaatgtcagtgtaaattgggagttaaacgatagttgacgcccaattgccaggactgcattccttcacggttacgatcaagacttaatgaaaagggatagccaatgtcggtatccaccacggcaccattcattgcatggcgcaaataaccaccactgccaaatacgcttccccacggcgcattccaggtcaattgtccactaaccaacgccgtttcattgggctggctggtattacgacttaaaccttcgagttgcgcgtaaaagccgagcaactcccctttcaacgtataattcgggtcgagcggtatgcttttctcgagaatactttgtatctgattggaaacatctttctgtaccgatgcccccagagaatagcgactggtatcatcatgccaactggcggctaaaaaagaacgagcgcgatgtttatcgtattttcccgtctggctgttatacaccccttcatcacgaataccggttgttgaatcagtccataaaaatactcgtgaacgccacattccccacagatcaatatttggcgttaaagcccaataacctaatgctccttcagaaactgtcggtaatgtacgttgcgaactgccagccattaacggaatacgataaggtaagctaccataactataatccgtcccgaagcgacctaatttaagcaggctattttcactgggttttatttttactgcctcgagggcaaagccaaaacttttatcaccatcaagataccaccgggtactcatatcagcacgagcacctaatttataaacataatacgctccgccttcaacgccaataatattggaataataaccactattgaaatcgagcaatcctccctgtacccatgcgtaaatatctcttcccgcgccagcactgggcttatcagccctgcgcaattcgtttttcagtctgatgcgtagtcccgcttcatcgtcagccagttgcgccgcgtaagcagaggtaaggccagaggcagccgtcaggcaaataacggccatggccactatttttctcatagttgcacctttgatgttctgattatttttattgaatattaattagtgatatcgctgattaattgctgctgcacttttttacgattatcaatttcaaccacgatttctttgaattttttatccgtgagcggataaaaccagataataacgaatgccagtagcataaatccgcaaggtactaaggcaattgatgtgcggatgcccataattacttccggcgtttgcacctgattggcgatatatccgcttaatcccaaaataaaggcaggaattgaaccaccgattgcctgaccgcatttacgggtaaatgagaatagtgaataggtgagcccttcaattcgcacgccggtcaggtattcaccgtattctacggtatcagcttccagcgcccacatcacggtcatggtaacgccctgaccaattgaggcaatggctaacgcaaccaacgccaccggcagcgaccagacggaaacccagaagaacagcagataaccgcaggttcccagcaaagcgccaatcaggaaggtattctttttaccgatcctcgcgaccatccccggcaccaacggtgccgatgccacagtaccaaccaggttttgcaccagtaccagcacagtgaacagcccggtatcatttaacacatagcgcacgtagaacaacgacgaggcgctgaccgcgaaggtcgaaatcagcacacacagcgcaccgatgcacaacataaacagcgggcgattccgtttcagggtttgcagactgatcttcaatgacggctgcgccacgatacgtaccacattctcacgcgtcgatttgaagcagatgaagtaaagcaccattccggcaatcgccagcacaatcgtccagaaatggtataccgacaccatctcttccgggctggagttcttaatgctcggccctatcagaaatgccaggcagacaaaggtcaatgaagcggcaatcccacgagccgcgcccagacgggcgcgggattgtggttgttgggtcatcgcggtagcaagtgaaccataaggaatattcaccaggctgtagcaaagcccgaggcccatgtaggtcaaatatgcatacaccactttgctaccatggctccagtcggtcggcacccagaataccagcacgctgaagatcattaacggcgcagtaccgaagagtaaaaacgggcggaattttccccagcgggtattcacactgtccaccactcgtccggcaaagacgtcggcgaaggcatcgaatacccgcaccagtaacagcatggtgcccgccgcagcggcaccgacgccagcgacgtcggtgtagtaactcaacaggaagagcgcccccattgcgaaggcgaagttattggcgatgtcaccaaggctgtagccgacgatggtgcgccaggagagttgttgattcattgtttgcctccctgctgcggtttttcaccgaagttcatgccagtccagcgtttttgcagcagaaaagccgccgacttcggtttgcggtcgcgggtgaagatccccttcttgttaccgccaacgcgcaatatgccttgcgaggtcgcaaaatcggcgaaattccatacctgttcaccgacgacggcgctgacgcgatcaaagacgcggtgatacatatccagccatgcacactgatactcttcactccacatgtcggtgtacattgagtgcagcccggctaacgtatccacgccgtattcggtgatgataatcggctgatgcagtttctcctgccaggccagaagttctttttccagtaccttctctgccgtttccaaatcgccgctttggacataccaaccgtaataacggttcaggcacagcacatcaaagagatcgctgatggtatcggtgtgagcgtcgcagaacattacattgacgcaggtgatcggacgcgtcggatcgagtttacgcgttgcttccgccagtggcgcgaaatattcccgtgcaccttgcggacgggtatccggttcgttggcaatactccacatcaccacgcttgggtggtttttgtcacgcgctatcagctctttaatcgcctgtaagtgcgcctgctgagtttccccgttgactgcctcttcgctgtacagttctttcggcttgttgcccgcttcgaaaccaatgcctaaagagaggttaaagccgacagctgcagtttcatcaatcaccacgatgccatgttcatctgcccagtcgagcatctcttcagcgtaagggtaatgcgaggtacggtaggagttggccccaatccagtccattaatgcgtgatcgtgcaccatcagcacgttatcgaatcctttgccgcgcaaatccgcatcttcatgacggccaaagccagtaaagtagaacggtttgtggttgatcaggaactgttcgcccttcactgccactgaccggatgccgacgcgcagcgggtagatatcacactctgtctggcttttggctgtgacgtacagttcatagagataaccttcacccggttgccagaggtgcggattcaccacttgcaaagtcccgctggtgnnnnttgtccagttgcaaccacctgttgatccgcatcacgcagttcaacgctgacatcaccattggccaccacctgccagtcaacagacgcgtggttacagtcttgcgcgacatgcgtcaccacggtgatatcgtccacccaggtgttcggcgtggtgtagagcattacgctncgatggatcccggcgtagttaaagaaatcatggaagtaagactgctttttcttgccgttttcgtcggtaatcaccattcccggcgggatagtctgccagttcagttcgttgttcacacaaactgtgatacgtacacttttcccggcaataacatacggcgtgacatcggcttcaaatggcgtatagccgccctgatgctccatcacttcctgattattgacccacactttgccgtaatgagtgaccgcatcgaaacgcagcacgatacgctggcctgcccaacctttcggtataaagacttcgcgctgataccagacgttgcccacataattacgaatatctgcatcggcgaactgatcgttaaaactgcctggcacagcaattgcccggctttcttgtaacgcgctttcccaccaacgctgatcaattccacagttttcgcgatccagactgaatgcccacaggccgtcgagttttttgatttcacgggttggggtttctacaggacgtaacataagggactcctcattaagataaaaatactggtcaacctttaatctgattagttaaccaattctgtgttgcacacagttatctgtgagaaacccatggaagagaaatggaaataaaaagaactgacaccgcgatcaaaaaaccaaaaactgcaatacccacagcgtgatatagatcgcattaatctttaaaacggcgttgacagaagccataaaataagcaaccgaacgttcgttcgagcatattgggaacgataaactctcatgacatatggctacggtgaatattttagggaggaattccccgctccggcgagattgtattttgtacagggaaattaaagtatgaaacgcgggctcagttgtcaccagcccgcggaaagagagagagaatcaggatgcggttaagataccgccaatcatcgcgcgtaatccctgagcaaacgacgcttcacgcgccaggtcttccgcttcgatatcggccagtacaccgtaggtcagatccagcagtaaacgtgaagtcattgccgtgttgatgtctgggcttatctcgcctttttgctgggcatcacgcatccgctgagcaacaaattcagtgatcgtcatatgcttatttttaagcatggcggcgacctgtgggttacgcatcccttccgccataatttcgaccaccagcgcccgttgcccaaaggcttcatgggtgagagagacaatagactcgaccatatagtcaacaaaatgaatcccttcaatcggttcccggaaacgggccagcgccctctcctggtcctgtaagataatcgcctgaatcaaggcttctttggagatgaaatggtgatagagcgtcccgggactaatggcgcaggatttacagatggctttcatcgaggcactgtgaaatccattttctgaaaaaatctctctggcagcattgaggatccgggtccgtgtcggttgtgcttcagtctgcatgttatccatcattaaaccattatagttagcgtgaataactagtttaccgcgttgtcaggtgagcgcctatcattgctgttgaatagtgcgaaggcacactctattcgtatgcttttcatccagctattggttaanntggccgtgatttggctgccagttgtttagcagagacgttgatgaattgcacacgctatcccggtaaacaacacatacggctgtttaccggttcgttagtgtattaattgagctcctgtaccccaccaccggagacggtgagaatttgtccgcttacccagctggctgcaggcgagcaaaggaacagcgctgcgttagcaatatcttgcggttggcccagacgtctgatcggtgtgtgctgtaacattttttgttcaatttctggtgtaataacggatttcagggcatcggttaatattgcccccggcgcaatgccattcacccgaatatttttttcacccaggtcaaatgccatatttctgaccagatgactggccgcagctttagatgatgcataggaagtcatgtttatatttttattntctgccgccatagaagtgatggtcagaataacgccaccgccatttttttccatttctggcgcaacaagttgtgacagatggaaaaaagaaaacacattcagttcataagcacggcgaaaatccgccattggcatatcaaacggtttaggtccaccgccaccggcgttgttaaccagaatatcaactttacccagcttactgatagcaaagtctgccagtgcagagagttcctgttcggaagtaatatcacaacggcaggcaaatgcctgaccacccagttgttgaatttcgtctacaacatggttagctgcgtcggcgttaatatcactgaccaccacagatgcgccagctgtcgcgaatgtaatggcgatttctttaccaatacctgcacccgcacctgtgatgatggcgcattttccgtcgagtctcaggttgtcagaattaaacacataaacctcctgtgaacttcagtaaaaataaaaggcaccgcctgtgtgccacattttttatcattaaacttgaggaaaggacactaccaggtatagcagataaagagaggattatttcgccgcaatgagccgggcgggaataataagattgcgtgaatgcgtctcttcatgggtgattttttgcatcatgcgatccgcaagtgtggtaccaagttcccgcgcaggcgtgctggcccaggtaacgggtatatcatcaagtgtggttggtgtcgcatcggtaaatgccgccagcgaaacctgttgctcaaagtaacgatcgactccgctttccccgctttgccgccctgctttcagcaaaccaaaccatgcccccatcgcaatagtttcgttatagcaaaccacggcactgatggtcgggttatgacgtaaaagcgccgtgatagcttccgcggcttgcttctggctggaagtgcactccaacacccaatcgctgtgaaacggcaggccaaattttagtagagttgcacaatagccccccacccgttctgcacgggttaatgaggaactttgccctcccagccaggcgatccgctgatgcccattgcgaatgagatgctccgtcaacaactgtgcagcctgcatgttgtccgggcgaaccgtatcaacatcatcaagataactggcacgggaagcgaaaatcaccgggatagctttttcttctgccatccgtcgcaggtcatcgctgcttcctgcagccccggcaattaccacaccatcgacaccctgattcagtaacagtgaaaaccgctgtgccagctgctcgccgtctttaccgccgtgaagcaaaaaaaccatccgtccctgcgcttccagagcttccgtcaatccggccgtcaattcggcgtaaaacggcgcagataaatcacggacgatcaaaccaatgacgccgctttgcccaccgcgcagcgccgacgcctggcgattgcgcacaaatcccagctcttcaatggcggngttaacgcgttctcctgtggcggtagagattcgccctttgccactaagcaccagcgaaacggtacttaccgacacgcccgcagccagcgcaacatcatgaatggttatttttttggcggtagccatgcagatgacctactccctgattttgtgacagataaaacgttttaccttttatttatcttatacccgctattatcgttgcgtaatgtgatttatgcctcactaaaatttgataaaacgttttatcttctcgcgcaatttactgaatccagattgttctctacgaggagtcgttttatgacggcgaaaacagcaccgaaagtcacgctgtgggagttcttccagcagttaggcaaaaccttcatgttacccgtggcattattgtcgttctgcggcattatgctcggcattggtagttcccttagtagtcacgatgtcatcaccctgctcccggtcctgggcaaccccgtgttgcaggctatctttacctggatgagtaagattggctcgtttgcttttagtttcctgccagtcatgttctgtatcgccatcccgctgggtctggcacgagaaaacaaaggcgtagcggcattcgctggcttcgtcggttatgcggtaatgaacctcgcggtaaacttctggttgaccaataaaggcattctgccaaccacggatgccgccgttctgaaagccaataacatccagagcattcttgggatccagtcgatcganaccgggatcctcggtgcggtgatcgccggtattatcgtctggatgctgcatgagcgattccataatatccgcctgccggatgcgctggcattcttcggcggtacgcgcttcgtaccaatcatctcctcgctggtgatgggccttgtcggcctggtgattccattagtctggccgattttcgccatgggtattagcggcttaggccatatgatcaatagcgcgggtgatttcggaccgatgctgtttggtaccggtgaacgtctgctgttgccgtttggtctgcatcacattctggtggcattaattcgctttaccgacgcaggtggcacgcaggaagtctgcggtcaaaccgtcagcggcgcattgaccatcttccaggcgcaattgagttgcccgaccactcacggtttttctgaaagcgccacgcgtttcctttcgcaaggcaaaatgcctgcgtttctcggcggtctgccaggtgcagcgttagcgatgtatcactgcgcncgcccggaaaatcgccataaaattaaagggctgctgatttctggcctgatcgcctgtgtcgttggcggcacgaccgaaccgctggaattcctgttcctgttcgtagcgccagttctgtatgtcatccacgcgctgttaaccggcctcggcttcaccgtcatgtctgtgctcggcgtcaccatcggtaataccgacggcaatatcatcgacttcgtggtgttcggtattttgcatggtctgtcaaccaagtggtacatggtgccagtggtggtggcaatctggtttgtcgtttactacgtcatcttccgtttcgctatcacccgcttcaatctgaaaaccccggggcgcgatagcgaagtggccagttcaatcgaaaaagccgttgccggtgcgccgggtaaatcaggttacaacgttccggcaatcctcgaagccttaggcggtgccgacaatattgttagcctcgataactgcattacccgtctgcgtttgtctgtgaaagatatgtcgcttgttaatgtgcaggcactgaaggacaatcgggcaattggcgtagtacaacttaatcaacataacctgcaggttgttatcgggccacaagttcagtcagtaaaagatgaaatggccggtctgatgcatactgtccaggcataaggataagatatgttcgatttttcaaaggtcgtggatcgtcatggcacatggtgtacgcagtgggattatgtcgctgaccgtttcggcactgctgacctgttacctttcacgatttcagacatggattttgccactgccccctgcattatcgaggcgctgaatcagcgcctgatgcacggcgtgtttggctacagccgctggaagaacgatgagtttctcgcggctattgcccactggttttccacccagcattacaccgccatcgatcctcagtcggtggtgtatggcccttctgttatctatatggtctcagaactgattcgtcagtggtctgaaacaggtgaaggcgtggtgatccacacacccgcctatgacgcattttacaaggccattgaaggtaatcagcgcacagtaatgcccgttgctttagagaagcaggctgacggctggttttgcgatatgggcaagctggaagccgtgttggcgaaaccagaatgtaaaattatgctcctgtgtagcccacagaatcctaccggaaaagtgtggacgtgcgatgagctggagatcatggctgacctgtgcgagcgtcatggtgtgcgggttatttccgatgaaatccatatggatatggtttggggcgagcagccgcatattccctggagtaatgtggcgcggggagactgggcgttgctgacgtcgggatcgaaaagtttcaatattcccgcgctgaccggtgcttacgggattatagaaaatagcagcagccgtgatgcctatttatcggcactgaaaggacgtgatgggctttcttccccttcggtactggcgttaactgcccatatcgccgcctatcagcaaggtgcaccgtggctggatgccttacgcgtctatctgaaagataacctgacgtatatcgcagataaaatgaacgccgcgtttcctgaactcaactggcagatcccgcaatccacttatctggcctggcttgatttacgtccgttgaatattgacgacaacgcgttgcaaaaagcacttatcgaacaagaaaaagtcgcgatcatgccggggtatacctacggtgaagaaggtcgtggttttgtccgactcaatgccggctgcccacgttcgaaactggaaaaaggtgtggctggattaattaacgccatccgcgctgttcgctaaccccaattgcgcaacgtaaaaaatcgttgcgcaatcgtggatttttaccctgctttgtttttataatggnnnnnacttttatatccagaaaaagagtgcgaccatgattgataccaccctgccattaactgatatccatcgccaccttgatggcaacattcgtccccagaccattcttgaacttggccgccagtataatatctcgcttcctgcacaatccctggaaacactgattccccacgttcaggtcattgccaacgaacccgatctggtgagctttctgaccaaacttgactggggcgttaaagttctcgcctctcttgatgcttgtcgccgcgtggcatttgaaaacattgaagatgcagcccgtaacggcctgcactatgtcgagctgcgtttttcaccaggctacatggcaatggcacatcagctgcctgttgcaggtgttgttgaagcggtgatcgatggcgtacgtgaaggttgccgcacctttggtgtgcaggcgaagcttatcggcattatgagccgaaccttcggcgatgccgcctgtcagcaagagctggaggcctttttagcccaccgtgaccagattaccgcacttgatttagccggtgatgaacttggtttcccgggaagtctgtttctttctcacttcaaccgcgcgcgtgatgcgggctggcatattaccgtccatgcaggcgaagctgccgggccggaaagcatctggcaggcgattcgtgaactgggggcagagcgcattggacatggcgtaaaagccattgaagatcgggcgctgatggattttctcgccgagcaacaaattggtattgaatcctgtctgacctccaatattcagaccagcaccgtggcagagctggctgcacatccgctgaaaacgttccttgagcatggcattcgtgccagcattaacactgacgatcccggcgtacagggagtggatatcattcacgaatataccgttgccgcgccagctgctgggttatcccgcgagcaaatccgccaggcacagattaatggtctggaaatggctttcctcaacgcagaggaaaaacgcgcactgcgagaaaaagtcgcagcgaagtaacaaaaatggatggtgcaaattgcaccatccatttttcatgcaaggcacaaagtcgcgcgatgtttggcggattcgatgcccagctcaatcaactccattacctggattgcctggcttgccggaaccggattttcaccatcgccatttaacgcatcacgaatcgccgcatagtaagccggataattcccaggcaccgtcaacagcgtttcttcgacacgttcctcaccttccacgcgggtaagtacgccatcacgcatatcgtagccccagtcttcctgcggcagacgctcgccatttttcagacgttcttcctgtggatcgaggccatatttcacataactgcctcgggatccatgcacgatataccgtgctgactcagcggctgccagcatggtaccgtgtaaaatgactcgccgctgtggataggacaagatggcgtggaaataatcggtcgactgcgctccgggccgtaactgtgccaaatctaccgtcatgctgaccggtaaaccaaatagcgtaatggcctgatcaagaagatgtggtgctaaatcgtaccagataccgctgcctgggccgccctgttcacgccaacgatcgcgcacctgcggacggaagcggtcaaaatgagactcaaagtaagcaacttcacccagcacgccttccgcgagcaaaccttttagcgtcaagaaatcgctatcccaacgacggttatggaatacagacagaacacgccccaggctttttgccagcgcatccagctctcgcgcttgtgacagtgtcacggtaaagggtttatcaacgaccacatgtttacccgcctcaagcgctgctttggctaacgggaaatgggtatcgttgggtgtaggaatgacaatcaggtctatgttgggatcgttaaacagatgcttcggctcagagacaaccgtaaccgttggccagtcggcttttacttttgtttcatcactgctggagattaccgccagttccagcccgggtgtgcccgcaatcaggggcgcatggaaggttttgctcgcataaccatacccaatcaacccaacacggatgttgtcgctcatgtcattgcctctcattgaagtatgatggctatttgacactatcctttaccctcgctcaacagtttaataacctgccagcaataagggatgttgtttaacttaagtcaannnnnnnnnnnntttttccaacgacaaaagctaaatatcgcaaaaacctcagtagaaatcttgctggagctattattgctaagtaacatttaccccctgaagttaatggatcaatcaacagagatgtgagttgtaatgaatcgtcttattgaattaacaggttggatcgttcttgtcgtttcagtcattcttcttggcgtggcgagtcacattgacaactatcagccacctgaacagagtactacggtacaacacaagtaagccctgcgcttgtagagcgacatgctgcccgtcagggtgcatgttttcacttgtcggatattaaaccaggaatttattatcttgttcggtgttgttggtgattgtcagggatagtaaagcgcgttactcttttcatagcagtttttcatccctgaatatttgccatcagcgcattcttattattgtaataacacaagcgttcacttttggtgaaattttatcatcactaataatacctacccctttggtattaattattttatggaccttttatgactgttcaggactacttattaaaatttcgcaaaatcagttcactagaaagtctggaaaaactctacgaccatcttaattacaccctgacggacgatcaggaactgatcaatatgtatcgtgctgccgatcaccgtcgcgcagagctggtttctggcgggcgtttgtttgacctcggccaggtaccgaagtccgtctggcactatgttcaataaagaaagtagcgatcggttataaaagccttataataacgcccctaaaattagatttgcctgtttgcgtcgctattctggagaacctatgaccaccacaacgccacaacgtattggaggctggttgcttggcccgttggcctggcttttagtcgctctgttaagtacgacgctggcgttgttgctgtataccgctgcgttatcttctccgcaaacatttcaaacgctcggcgcacaagcactgacgacacaaatcttatggggcgtttcttttattaccgctatcgccatgtggtattacacactgtggttgaccatcgctttctttaaacgtcggcgttgtgttcctaaacactatattatctggctgcttatttccgtattgctggcggtaaaagcgttcgctttttcacccgtggaagatggcatagccgttcgccagttgctgtttactttgttggcaaccgcattgatcgtcccctatttcaaacgctcgtcgcgggtgaaagcgacgtttgtgaatccgtaataaccttacagttaacctgttgtcgcctgctctggattaacggataataggcggcttnnnnnnnnnaggccgaaaaatgactgactacctgttactgtttgtcggaactgtactggtcaataactttgtactggtcaagtttctcggtctctgtccgtttatgggggtttccaaaaagctggaaaccgcgatgggcatggggctggcaacaacgtttgtgatgacgctggcgtctatttgcgcctggcttatcgatacgtggattttgatcccacttaatctgatttacctgcgcaccctggcatttattctggtgattgctgtggtcgtgcagttcaccgagatggtggtgcgcaaaaccagcccggtgctttaccgtttgctggggatttttttgccgcttatcaccaccaactgtgccgtgctcggcgtggcgttgctgaatatcaatctcgggcacaatttcttgcagtcggcgctgtacggtttttccgccgctgtcggtttttcgctggtgatggttctcttcgcagccatccgcgaacgccttgctgtggctgatgtcccggcaccttttcgcggtaatgccattgcgttaattaccgcaggtcttatgtctctggcctttatgggctttantggtttggtgaanttgtaatgaatgctatctggattgccgttgccgccgtgancctgctgggcctggcgtttggcgccattctgggttatgcctcccgccgttttgcggtggaagacgatccggtcgttgagaaaattgacgaaatcttaccgcagagccagtgtggtcagtgcggttatcccggctgtcgcccctacgcggaagccatcagctgtaacggtgaaaaaatcaaccgttgcgcccctggtggcgaagctgtgatgctaaaaattgccgagttgcttaatgtcgagccgcagccgctggatggcgaagcgcaagagctaacgcctgcgcggatggtggcggttattgatgaaaataactgtattggctgcactaaatgtattcaggcgtgtccggtagacgccatcgttggcgctacccgtgccatgcatacggtaatgagtgatctctgtacgggctgcaatttatgtgttgatccgtgcccgacgcactgcatctcgttgcaaccggtcgcagaaacacctgactcctggaaatgggatctgaacaccattcccgtgcgtatcattcccgtggaacaccatgcttaagttattctctgcattcagaaaaaataaaatctgggatttcaacggcggcatccatccaccggagatgaaaacccagtccaacggtacacccctgcgccaggtaccactggcgcagcgttttgtcattccactgaaacagcatattggcgctgaaggtgagttgtgcgttagcgtcggcgataaagtattgcgcggccagccgcttacccgtggtcgcggcaaaatgctgcctgttcacgcgcccacctcgggtaccgttacggctattgcgccccactctacggctcatccttcagctttagctgaattaagcgtgattattgatgccgatggtgaagactgctggatcccacgagacggctgggccgattatcgctctcgccgtcgcgaagagttaatcgagcgcattcatcagtttggtgttgccgggctgggtggtgcaggattcccgacaggcgttaaattgcagggcggcggagataagattgagacgttgattatcaacgctgctgagtgcgagccatacattaccgccgatgaccgtttgatgcaggattgcgcggctcangtcgtagagggtattcgcattcttgcgcatattctgcagccacgcgaaattcttatcggcattgaagataacaaaccgcaggcgatttccatgctgcgcgcggtgctggcggactctcacgatatttctatgcgggtgattccaaccaaatatccttctggcggtgctaaacaattaacctacattctgaccgggaagcaggttccacatggcgggcgttcatccgatatcggcgtattaatgcaaaacgtcggcactgcttatgcagtgaaacgtgccgttattgatggcgagccgattaccgagcgtgtcgtaaccctgactggcgaagcaatcgctcgcccgggcaacgtctgggcacggctggggacgccagtgcgtcatttattgaatgacgccggattctgcccctctgccgatcaaatggtgattatgggcggcccgctaatgggctttaccttgccatggctggatgtcccggtcgtaaagattaccaactgtctgttggctccctctgccaatgagcttggcgaaccacaggaagaacaaagctgcatccggtgtagcgcctgtgctgacgcctgccctgcggatcttttgccgcaacagttgtactggttcagcaaaggtcagcaacacgataaagctaccacgcataacattgccgactgcattgaatgtggggcttgcgcgtgggtttgcccgagcaatattcccctggtgcaatatttccgtcaggaaaaagctgaaattgcggctattcgtcaggaagaaaagcgcgccgcagaagccaaagcgcgtttcgaagcgcgccaggctcgtctggagcgcgaaaaagcggctcgccttgaacgacataagagcgcagccgttcaacctgcagccaaagataaagatgcgattgctgccgctctggcgcgggtgaaagagaaacaggcccaggctacacagcctattgtgattaaagcgggcgaacgcccggataacagtgcaattattgcagcacgggaagcccgtaaagcgcaagccagagcgaaacaggcagaactgcagcaaactaacgacgcagcaaccgttactgatccacgtaaaactgccgttgaagcagctatcgcccgcgccaaagcgcgcaagctggaacagcaacaggcaaatgcggaaccagaacaacaggtcgatccgcgcaaagctgccgtcgaagccgctattgcccgngccaaagcacgcaagctggaacagcaacaggctaatgcggaaccagaacaacaggtcgatccgcgcaaagccgccgtcgnngccgnnnnnnnnnnnnnnnnnnnnnnnnnnnnnnnnnnnnnnnnnnnnnnnnggaacagcnncaggctaatgcggaancagaagaaccggtcgatccgcgcaaagccgccgtcgaagccgctattacccgtgccaaagcgcgcaaactggaacagcaacaggctaatgcggagccagaagaacaggttgatccgcgcaaagctgccgtcgcagcggctattgcacgcgccaaagcacgcaagctggaacagcaacaggctaatgcagaaccagaagaacaggttgatccgcgcaaagcggcagttgccgcggctattgcccgcgttcaggccaaaaaagccgtccagcaaaaggttgtaaacgaggactaaatggtattcagaatagctagctccccttatacccataaccagcgccagacatcgcgcattatgctgttggtgttgctcgcagccgtgccaggaatcgcagcgcaactgtggttttttggttggggtactctcgttcagatcctgttggcatcggttagtgctctgttagccgaagctctcgtactcaaactacgcaagcagtcggtagccgccacgttgaaagataactcagcattgctgacaggcttattgctggcggtaagtattccccccctcgcgccatggtggatggtcgtgctgggtacggtgtttgcggttatcatcgctaaacagttgtatggcggtctggggcaaaacccgtttaatccggcaatgattggttatgtggtcttactgatctccttcccggtgcagatgaccagctggttaccgccacatgaaattgcggtcaacatccctggttttatcgacgccatacaggttattttcagcgggcataccgccagtggtggtgatatgaacacactacgcttaggtattgatggcattagtcaggcgacaccgctggatacatttaaaacctctgtccgtgccggtcattcggttgaacagattatgcaatatccgatctacagcggtattctggcgggcgctggttggcaatgggtaaatctcgcctggctggctggcggcgtatggttgctatggcagaaagcgattcgctggcatattcccctcagcttcttagtaacgctggcgttatgcgcaacgttgggctggttgttctcaccagaaacactggcagcaccgcaaattcatctgctgtctggagcgaccatgctcggcgcattctttattttgactgacccggttaccgcttctacgaccaatcgtggtcgtcttattttcggcgcgcttgcgggcttattagtctggttgatccgcagtttcggcggctatcctgacggcgtggcttttgccgtcctgctggcgaacatcacggttcctctgatcgattactacacgcgtccgcgcgtctacggccatcgcaaagggtaaaccatgctgaaaactatccgaaaacacggcattacgttggcgctatttgcagcgggttcaacagggttaactgcggccatcaaccagatgaccaaaacgacgattgctgaacaggccagtctgcaacaaaaggctttatttgatcaggtgctgccagccgaacgctataacaatgcgctggcacagagttgctatctggtaactgcgccagagttaggtaaaggtgagcatcgggtttacatcgccaaacaggatgacaaaccggtagccgccgttctggaagcaaccgcgccagatggctattccggtgcgattcagctgctggtgggagccgattttaacggcacggtacttggcacgcgcgtgacagagcaccacgaaacgccagggcttggcgataaaatcgaactgcgcctttctgactggatcacccattttgcgggtaaaaaaatcagtggtgcggatgatgcgcactgggcggtgaagaaagatggtggtaatttcgaccagttcaccggcgcgacgattactccccgcgcggtggttaatgcggtaaaacgcgccggattgtacgctcagacgttaccggaacaactttctcaacttcctgcctgtggagaataaagcgtgagcgaaattaaagacgttattgttcaggggttgtggaaaaacaactctgcgctggtccagttgctcggcctttgtcctctgttggctgtcacgtccactgccactaacgctctgggtttaggacttgcgactacgctggtactgacgctgaccaacctgaccatttcgacgctgcgtcactggacgccagccgagatccgcattcccatttacgtgatgatcatcgcctcggtggtcagcgctgtacagatgctgatcaacgcctacgcctttggcctgtatcaatcattagggatttttattccgctgattgtcactaactgtatcgttgtgggccgcgctgaagccttcgctgccaaaaaannnnnnnnnctttcggcactggacggcttttcaattggtatgggcgcaacctgcgccatgttcgtgctgggttcactacgcgaaattatcggcaatggcacattgtttgacggtgcagatgcgctgttaggtagctgggcaaaagtattacgcgtggagattttccacaccgactcccctttcctgctggcgatgctgccaccaggtgcatttattggcctgggactgatgctggcaggaaaatacctgattgatgaaagaatgaaaaagcgccgtactgaagcagctgccgaacgtgcattgccaaacggtgaaacagggaatgtctgatgaacaaagcaaaacgcctggagatcctcactcgcctgcgtgagaacaatcctcatcccaccactgagcttaatttcagttcgccttttgaattgctgattgccgtactgctttccgctcaggcaaccgatgtcagtgttaataaggcgacggcgaaactctacccggtggcgaatacgcctgcagcgatgcttgaactgggcgttgaaggggtgaaaacctatatcaaaacgattgggctttataacagcaaagcagaaaatatcatcaaancctgccgtatcttactggagcagcataatggcgaggttccggaggatcgtgctgcgcttgaagccctgcccggcgtaggtcgtaaaacagccaacgtcgtattaaacactgcattcggctggccgactattgctgtcgacacgcacattttccgcgtttgtaatcgtactcaatttgcgccggggaaaaacgtcgaacaggtagaagaaaagctactgaaagtggttccggcagagtttaaagtcgactgccaccattggttgatcctgcacgggcgttatacctgcattgcccgcaagccccgctgtggctcttgtattattgaagatctttgtgaatacaaagagaaagttgacatctgaagaaaaggggtaacaccgattaccccattgataacctttctttatcctcttttaaaacatctttttaacgtcaatgatgccattgcttagcgttatcatcaggtaatccgtttgcggataaccaaaaatgcaggttaattgtttttttaatagcgaaattttctattcattcgtgatcaagatcacgatgctgtggcaatgtaaaaacattgcaagaatcaggttaaaatcatttaaatttacacacgcaacaaatattgacctacaaaacattacactggctatttttaagaaactggactatctcactaggaaaaacgctaaatagcagaacatatcgccgtcaagccatcatccccctctcaatgcagtgaaaaaatctgccgttacgttttttgaaaaatttaacgctggataacatttcccggaatggttgaattccccgcctcagttatatgtaacagattattacaaaggacttgtctgaaagtgcaagatagtgaacattacctgccgtttcccctcccactataacaattgcgcgtatgttttttagacataacgcgagaaagcacccccgttaatatgggatgtaaaaaaagaggtaaaagtgtccactgcaaaccaaaaaccaactgaaagcgtcagtttgaacgctttcaaacaaccgaaggcgttctatctcatcttctcgattgagttatgggaacgttttggttattacggcctacaaggaattatggctgtttacctggttaaacaactgggtatgtctgaagcggattcaatcacccttttctcttcctttagtgccctggtttatggtctggtcgctatcggcggctggttaggtgacaaggtactgggtactaaacgcgtaattatgctcggcgctattgtgctggcgattggttatgctctggttgcctggtctggtcacgacgccggtatcgtttatatgggtatggcggctattgcggtcggtaacggcctgtttaaagctaacccgtcttctctgctttctacatgctatgagaaaaacgacccgcgtctggacggtgcattcaccatgtactacatgtccgtcaacatcggctctttcttctctatgatcgccaccccgtggctggccgcgaaatacggctggagtgttgcgtttgcgttgagcgttgtaggcctgctgatcactatcgttaacttcgccttctgccaacgctgggttaaacagtacggttcaaaaccagacttcgagcctatcaactaccgtaacctgctgctgaccattattggtgttgtggcactgatcgctatcgccacctggctgctgcacaatcaggaagttgcgcgtatggcgctgggcgttgttgccttcggtatcgtggttatcttcggtaaagaagccttcgcgatgaaaggtgctgcgcgtcgtaaaatgatcgttgccttcatcctgatgctcgaagccattatcttcttcgtgctgtacagccagatgccaacgtcactgaacttctttgcgattcgtaacgttgaacataccattctgggcctggccgtagaacctgagcagtatcaggcactgaacccgttctggatcatcattggtagcccgattctggccgctatctataacaagatgggcgataccctgccgatgccaaccaagtttgcaatcggtatggtgatgtgttctggtgcgttcctgattctgccgctgggtgcgaaattcgcgtctgacgcaggtatcgtgtctgtaagctggctggtcgcgagctatggcctgcagagtatcggggaactgatgatctctggtctgggtctggcaatggttgcacaactcgttccgcagcgtctgatgggcttcattatgggtagctggttcctgaccactgccggtgcaaacctgattggtggttatgttgcgggtatgatggctgtgccggataacgttaccgatccgctgatgtcactggaagtctatggtcgcgtattcttgcagattggtgtcgctactgccgttattgcagtactgatgctgctgaccgcgccgaaactgcaccgcatgacgcaggatgacgctgcagacaaagcggcgaaagcagccgtagcgtaaaattcagggaaactcttttacaagccgctaacttttcgttagcggctttttttttgttcagcaacgcactaccatactttaaaccacagacaaaaggagttaccgatgaaattgttctacaaaccgggcgcctgctctctcgcttcccatatcaccctgcgtgagagcggaaaggattttacgctcgtcagtgtggatttaatgaaaaaacgtctcgaaaacggtgacgattactttgccgttaaccctaagggacaggtacctgcattgctgctggatgacggtactttgctgacggaaggtgtagcgattatgcagtatcttgccgacagcgtccccgaccgccagttgctggcaccggtaaacagtatttcccgctataaaaccatcgaatggctgaattacatcgccaccgagctgcataaaggtttcacacctctgtttcgccctgatacaccggaagagtacaaaccgacagttcgcgcgcagctggagaagaaactgcaatatgtgaacgaggcactgaaggatgagcactggatctgcgggcaaagatttacaattgctgatgcctatctgtttacggtactgcgctgggcatacgcggtgaaactgaatctggaagggttagagcacattgcggcatttatgcaacgtatggctgaacgtccggaagtacaagacgcgctgtcagcggaaggcttaaagtaatagccgtcggcccacagttcgttgtgggccgaaatgagatatttcagagctttgttgcgctgaagtaatgttctggtttggcaatacgatcctgagcagcaaccacttgcaactcatattcctgcattgctttggtggtcaccatgatttcgtagactgcagcggtcacatgttccagggcctcctgcagcgttgccccctgaagcagtttcaccagcagtaaaccgctcgtcacatcaccaacacctaccggctggcgcataccaaaatccaccagtggacggctgatatgccaggcttcatcggcggtgaccagcaacatttcaaaacggtcacggctgtagccagctcgcgccaggtgtttaaccaatacaatttgtggcccttgcgcaatgagttcgcgcgctgccagaaccgcttcttcgacgttatttaccggatgctcacagagtatttccagctcaacaagattcggcgcaatgatatcgctggcaggcaaaccgtgccgcacatgaaactctgcgacacccggtgcaacgatacagcctttttctggatgacccattaccggatcgcaaaaatatttcgcctgcggattcgctgctttcacctgacggacgataccgaggatatgttcaccctgctccgccgatcccagatagccacttaatacggcatcacaggtgtctaatttatcaatggcggcaatgccttgcacaatttcggttaaatggctgggcggcatcacgcagccagtccatttgccgtattgggtgtgattagaaaattgaacggtgttcagcggccagacgttcgcgcccaggcggngcatcggaaactctgccgcactgttacccgcatgaccataaacaacgtgagactggatagcgagaatatttttcatcatgttccctgtataaaaaccagggggagtgatttctcactccccctttccacttaatgcattatttccagcaaatcagacagtaattctttttgccgcgacgcagtaaggtaaaacgaccaaacagacgatcttcttctttaaagaagtattcaggatcggactgtttttcaccgttaatggtgatggcattggaggcgatagttttacgcgcctgaccacgggaaggttgcagttcagaatcgaccagcgcctgcatcaggtctgcncccttttccatctcaaccatcggtacgccgtcctgcgccagctgttcgaagtccgcttcactcagcgcactcaaagaaccgctgaacaggcattcggtaatacgttttgccgcctgtaaaccttcttcaccgtgaaccagacgagtcacctgctccgccagtacatactgggcgcgcggtgctttaccgctgtttttatcttcttcttccagggcgttgatctcttcaatgctcataaaggtgaagaacttcaggaagcggtaaacgtcggcatccgcagtgttgatccagaactggtagaatttgtacgggctggttttcttcggatccaaccagactgcgccgccttcagttttaccaaatttggtgccatctgctttggtgatcagcggaacggtcaggccaaacacctgattctgatgcagacgacgggtcaggtcgataccagaagtgatgttaccccactgatcagaaccaccaatttgcagcaccacaccgtactgtttgttcagacaggcgaagtcataaccctgcaacaggttgtaggaaaactcagtgaacgaaatcccctgatcttcacggttgagacgctgcttaaccgcttctttgttgatcatctggttaacggagaagtgtttgccaatatcgcgcaggaaggtcagcacattcatattgccgaaccagtcatagttgttcgccgcgatagcagagttttctccacagtcgaaatcgaggaacggggcaacctgcttgcggattttgtccacccactcctgaacagtttcttcggtgttcagcttacgctcggcagctttgaagctcgggtcgccaatcagacccgtcgcgccgcctaccagcgcaaccggcttgtggcccgcctgctggaagcgtttcaggcataacaatggaacaagatgccccaaatgcaagctgtcagcggtaggatcgaagccgcaatagagcgcgatcgggccttgcgccagtcgctctgctaacgcttcctcgtccgtcacctgggctaccagcccccgctcttgcaattgtttaatcaagttactgcttgccatcaaaatctccatgtatataacgacnnnnacctttgccggtacacgacttttcgccagatgcgaaagagacatagaataaagtgccagaatcaggagtaccagcgattaaagcaagatttttgcatcttttcagggtgcaagacgatcaatcttccacgcatcattttcacgctggtacaaaaagcggtcatgcaggcgatgctcaccgccctgccagaactcaatctgttcaaggctgacgcgaaaaccgccccaaaagctcggcaatggcacttcgccttgttgaaacttctgcttcagctccaggaatttactttcaaggataccgcgggcagaaatgcgactggactgcttcgaaacccatgaaccaatctggctatcacgcgggcggctatgaaaatatttcatcacttcgagagtcgaaagtcgttctgctttaccgatcaccatcacctggcgttcaagggtatgccacgggaacagcaggctaacgcgcggattattttcaatttgatgtgctttacggctaccgaggttggtgtaaaacaccatgcctttttcgtcgtaatgtttgagtaaaacgatgcgctgataaggctgaccatgttcatccacggtagcgaccaccatcgcggtagggtccgccagtttggcttcacaagcctgagagagccaacgttcaaaaagggttaatggatcggcgggaagatcgcggcggcgtaacccgcctttggtgtattcacggcgcagatgcgcgatttgctgcaattcgtcgttatcagacatggttttctttacggattgtcagtgggtgacgctattgtgcgccgcccctggaaaaatctcaacgctgtggattttgtaactgacagttattcaagacgatgcggtcgcgtttatagacagtcgcttcctcacctttcgaccagaaaacatagatcccgtcggagtaacgcgcgccagaggctgaaaggccctgtttgagatgcagtagttgattatcgtaaacaaaactgacttcctggcgcggattattcagtttgaccgtcaacggtttttcatcacactggtattccagcgtatcggtttgcattcgctcaaccagttgattaaaggcgctacagccggagagaaggaccggcaaaatgataattaacagttttttcatagtcatatcccgaagactttcctggtccggagggcaaataccctccttaatcttccaagtgtaacggcagacacgataagaaaaaattcagttaattctgatatcacgagttggcggggaaaatagcccccagaaccgtctcctggcttgcgccagtgacggaaggcagatttcctggtaatcccgccagcgtccgccaggcaagccaagcgaaagccaatgcttccatgtcatcgccactaatgccaacggcatcggtggtggtgacttctgtgcctggcagtaatgccgccagacgcgccatgagtagcggattacgactacctccaccacataccatcaatcgttcgcagccaccgctcaacaaaacttgttcagaaatggtcacggcggtgagttctgccagtgtggcctgaacatcacggggatcaacacccggaaaatggcgtaaatggcgctccagccagccgtagttaaagtattcgcgtccggtgcttttcggtgcaggttgcgagaaatatgggtcgctgagcatattttgcagcagtgggagaataactttacccgcccgtgcccactcggcatctttatcgtaaggtttaccggcctgacgccagatccaggcatccatcagcatgttaccaggaccggtatcgtagccgccaaccggctgcccaggaatgagcagtgacagattggcgatgccgccantattgagcaccattcgtcgctcagttgggtgagccagcaaggcatgatggaacgcaggtaccagcggtgcgccttgtcctcccaaggcaatatcgcgacggcgaaaatcaccgacaaccgtaattccggtgcgtgccacaatttgattgttatcgccaatctgtaaagtgtgtggtgccacgcccgtcggttcatgccagacggtttgaccgtgacagccgatcgcaactatatctctcgcctgcaggttttgttccttaagcaaggcattgaccgcatcagcaaaaagtcgcccgagttgagtatcaagctgtccaaactgcgaaagtgtaagctgttggccctggcaaatatccagtacagcctgtttcagagacaccgggatcggccagctcaaacttgccagctgtgcgacccggtgttcatcaattgtcgccaacacaacatcaacaccatcaaggctggtgcctgacataacgccaataaagcggcccgatttcatagttcatcctttttcaatctgacgtttgcgcacactcaaacataaacttttcgtgaataccatgcggaatgaccgatttttaccgttggtagtaaaacattatcttcaaatcaataatcatcatgaatgttttgtttataattggttgatcctactttcattatgatttgctcatatttggtagaacatgtaaccatggattcacatatgccatatactttgaccatgagggatgcttgctgtggcgtttcatggtgaacaggagatttttcaatgattaaacgcgtattggttgtttcaatggtaggtctgtctcttgtcggntgtgttaataacgacaccctgtcaggggatgtttataccgcttctgaagcgaaacaagtacagaatgtcagctatggaaccatcgttaacgtacgtccggtacagattcagggcggtgatgattccaacgttatcggtgcaattggcggtgctgttcttggtggtttcctgggaaatactgttggtggcggaaccgggcgttctctggctactgcagcaggcgctgttgcaggtggcgtagctggtcagggcgtacagagtgcaatgaacaaaacgcaaggtgtcgagctggaaattcgtaaagacgatggtaataccatcatggtggtacagaaacaaggcaacactcgtttctctccgggccaacgtgtcgtactggccagcaatggcagtcaggtgaccgtttctccgcgctaaataagtttgcgtgtggtcaggttactgaccacacgcccccttcatttcaccctttggcctgtaactcaatgatattatgctcaagttttgcgatgagcgtaatcagttgttccagttcctctgcggagatgccatgtaaaatttccgcgcgggttttgttaataacagcttccatttcgctgatcagcggctctgccttttccgtcagtttaatacgtttagcccgacgatcgctggcacaagtttgacgcgaaattaaccctttttcttccagttggtccagagtacggaccagtgatggctgctcgatgccaatcgcttttgccagttgaatttgcgactggtctggaggtaactgatggatattgtgtaacgtaacccaatgggtttgtgttaactccagcggtttcaggcgatggtctatcagagcacgccatatgcgcaccaaccgtgccagatcagaacctagtggcgattccaatttcatctccttataattagcttgctaagatattatgcggcttttagaatagtgtgcagcaattgtattgctaaaacaaatgtattgctgcatttggttaccgtcagacatatttttcagaanttgcgngtanntttttcgcacttaaagaatatttattaatctaacgcaatatattcggtcgtaaaggaatctactttgtgaagtttatgctcaatgcaacaggattgcccttacaagatctggtgttcggtgcgtccgtctactttcctccgtttttcaaagccttcgcgtttggattcgtcatctggcttgtcgtacaccgcctgcttcgtggctggatctacgccggtgacatctggcatcccttgttaatggatttatcgctgtttgcgatttgcgtttgccttgctctggcaatactgattgcgtggtaactatgtcaattaaaacaattaagtatttctcaacaatcattgtagcggtagttgcggttcttgccggatggtggctgtggaattattacatgcaatctccgtggacacgcgacgggaaaatacgcgcagaacaggtttctatcaccccacaggtgtcgggacgtattgttgagctgaatataaaagacaaccagctggttaacgcgggggatcttctgctcacgatcgataaaacgccctttcagatcgccgagctgaatgcacaggctcagctggcgaaagcgcaatctgacctcgcaaaagccaataacgaagcgaatcgtcgtcgtcatctctcacaaaattttatttctgccgaagaactcgataccgctaacctcaatgttaaagcgatgcaggccagtgttgatgccgcacaggcgacgctgaaacagacacaatggcaactggcgcaaacggaaattcgcgccccggtgagtggatgggtgactaatctcactacccgcatcggcgattacgctgacaccgggaaaccgctgtttgcccttgtcgacagccactcgttttacgtcattggttattttgaagaaaccaagttgcgccatatccgcgaaggtgcaccagcacaaattaccctctatagtgataacaaaacgttacagggtcacgtttccagtatcggtcgggcgatttatgatcagagcgttgaaagtgactcaagccttattccggatgtgaaacctaacgtcccctgggttcgtctcgcccaacgcgttcccgtccgctttgcgctggataaagttccagacgatgtcacgctggtgtcgggcaccacctgtagcattgccgtaggtcaataatgaacgcatcgtcatggtccttgcgcaatttgccctggttcagggccacgctggcgcaatggcgttatgcgttacgcaataccattgccatgtgtctggcgctgacggttgcctattatttgaatctggatgaaccctattgggcgatgacctcggctgcagtggttagctttcccaccgttggcggtgtcatcagcaaaagcctcggacgcatcgctggcagtttactgggagccattgcggcactgcttcttgccgggcatacgctcaatgagccgtggttttttctattgagcatgtcggcgtggcttggcttttgtacctgggcctgtgcgcacttcacgaataacgtcgcgtatgcatttcaactggcgggctacacggctgccatcatcgcctttccgatggttaatattactgaggccagccagctgtgggatatcgctcaggcgcgcgtttgcgaggtgattgtcggtattttgtgcggcggcatgatgatgatgatcctgcctagcagttccgatgctacagcccttttaaccgcattgaaaaacatgcacgcccgattactggaacatgccagtttactctggcagcctgaaacaaccgatgccattcgtgcagcacatgaaggggtgattgggcagatactgaccatgaatttgctgcgtatccaggctttctggagccactatcgttttcgccagnnnnnnnngcgccttaatgcgctgctccaccagcaattacgtatgaccagtgtcatctccagcctgcgacgtatgttgctcaactggccctcaccgccaggtgccacgcgagaaattctcgaacagttgctgacggcgctcgccagttcgcaaacagatgtttacaccgtcgcacgtattatcgccccgctacgcccgaccaacgtcgccgactatcggcacgtcgccttctggcagcgactacgttatttttgccgcctttatctgcaaagtagtcaggaattacatcgtctgcaaagcgatgtagatgatcatgccagactcccacggacatccggcctggctcgtcataccgataacgccgaagctatgtggagcggactgcgtacattttgtacgttgatgatgattggcgcatggagtattgcttcgcaatgggatgccggtgccaatgcattaacgctggcagcgattagctgcgtactctactccgccgtcgcagcaccgtttaagtcgttgtcactgctgatgcgcacgctggtgttactttcgctattcagctttgtggtcaaatttggtctgatggtccagattagcgatctgtggcaatttttactgtttctctttccactgctggcgacaatgcagcttcttaaattgcagatgcccaaatttgccgcattgtgggggcaactgattgtttttatgggttcttttatcgccgtcactaatcccccggtgtataattttgctgattttcttaacgataatctggcaaaaatcgttggcgtcgcgttggcgtggttagcgttcgccattctgcgtccaggatcggatgctcgcaaaagccgccgccatattcgcgcgctgcgccgggattttgtcgatcaactaagccgccatccaacactgagtgaaagcgaatttgaatcgctcacttatcatcacgtcagtcagttgagtaacagccaggatgcgctggctcgccgttggttattacgctggggtgtagtgctgctgaactgttctcatgttgtctggcaattacgcgactgggaatcgcgttccgatccgttatcgcgagtacgggataactgtatttcactgttgcggggagtgatgagtgagcgtggcgttcagcaaaaatcactggcggccacacttgaagaattacagcggatttgcgacagccttgcccgccatcatcaacctgccgcccgtgagctggcggcaattgtctggcggctgtactgctcgctttcgcaacttgagcaagcaccaccgcaaggtacgctggcctcttaattacttaattacaccacaggcatagcgttcaccgccaccgcccagcggtttaggttgatcggacatattatcgccgccaacgtggaccatcagcgctttgtctttgatttcatccagtgatttcagacgaggcgcgatgacggcatcggtagctttgccgtcattattgacgaccagtgcaggcagatcgcctaaatgcccggcaccttctggcccttcatgtttaccggtattttgtggatcaagatgcccgcctgcggattccgcggcgctggctttgccatctttggtggctggctggcagcttcctttggcatgaatatggaagccatgttcaccgggaggtaatgctttcagatcgggcgaaaactccagacctttatcggtttcagtaatggtgacgctaccaattgactgcccaaccccttgcgacgtgacgaggttcatctcgactttttcactggcagcttgtgcgccggtcgcaacaaccagcgccagaatggccagactaaaacgtttcataggacctccgttcattgtgcattcctgaataagtgtaaaccagtgacacatttttgaacggcggctattcctaaaagtgcttacggtacgtcgtaccccagtgccgctttacggatacgaaaccattgttgacgggtcattttcagtgtttctgcttcgacagctgcccgtacgcgctcaattttacctgagccgataattggcagcggctgcgacggtaaacgtaatacccaggcgtaaaccacctgttcaatcgagcccgcgtttaactcctccgccaccacagccagttcatcacgcagcggctggaaataatcatcattaaacagacgaccaccaccaaggcaggaccacgccatcggacgaacacgcagttgttgcagttggtcgagcgtgccatccagcagtaacggctgatgtaccggggatatttccacctgattagtggcaagggtaaacggcagacgtgattgcaacagggcaaattgcgcaggcgtgaagttggatacgccaaaatgacgcactttgccgctctgatgcagatgtttgaacgcgtccgccacttcatcggcatccattaacgggtccgggcggtggattaacagcagatccagatgatcggtcgcaagattaattagcgactgttcggcgctcttaatgatgtgatcgcggtcagtgatgtaatgaccaatgacgttttcttcacgcgcggtcgtcgcgataccgcatttactgacgatttccatccgctcacgcaggtgaggtgccagtttcagcgcctcgccaaacgccgcttcgcactgatagccaccataaatatcagcatggtccacggtggtcacgccgagatccagatgctcttcaataaaactgaccagctggcgggcggacatgttccagtccatcaatcgccagtagcccatcacaaaacgggaaaactccgggccttgcggcgcaatagtaatacgctgaaccataatcgcttcctcttatcagatatgagaggagtatacgcaagattaggctcaaaagagtgatggttgctccggttcgtctgatgacgctggcttatttgcacgtaatttgcgcattaatcgctgccgacaaaggcgcagcacctcttgtttttcgccatcgctcattttattccagttaaaacgctcatcccggcttcgaaaacagccgcgacaaaacccgcgttcgtcagactggcaaattccccggcacgggctctggacgggaaagaactctaattgctccgccacttcgccctcctcaaataagattattaccattattgaagctgttaatgcccaaagtagcaactttgcttgcactagaccgactggtctactacactccaacgcatgaacaaacacaccgaacatgatactcgcgaacatctcctggcgacgggcgagcaactttgcctgcaacgtggattcaccgggatggggctaagcgaattactaaaaaccgctgaagtgccgaaagggtccttctatcactactttcgctctaaagaagcgtttggcgttgccatgcttgagcgccattacgccacatatcaccaacgactgactgagttgctgcaatccggcgaaggtaactaccgcgaccgcatactggcttattaccagcaaacactgaaccagttttgccaacatggaaccatcagtggttgcctgacagtaaaactctctgccgaagtgtgcgatctgtcagaagatatgcgtagcgcgatggataaaggcgctcgcggcgtgatcgccctgctctcgcaggctctggaaaatggccgtgatagccattgtttaaccttttgtggcgaaccgctgcaacaggcacaagtgctttncgcactatggctgggtgcgaatctgcaggccaaaatttcgcgcaattccgagccactggaaaacgcgctggcacatgtaaaaaccattattgcgacgcctgccgtttagcaggcattttttatcaccagacgaccgggagcctttatgtcatctgaaaaactgtattccccactgaaagtgggngcaataactgcggcaaaccgtatttttatggcaccgctgacgcgtctgcgcagtattgaaccgggtgacatccctaccccgttgatggcggaatactatcgccaacgtgccagtgccggtttgattattagcgaagccacgcaaatttctgcccaggcaaaagggtatgctggtgcacctggcatccatagtccggaacaaattgccgcatggaaaaaaattaccgctggcgttcatgctgaaaatgggcatatggccgtacagctgtggcacaccggacgcatttctcacgccagcctgcaacctggcggccaggcaccagtagcgccttcagcacttagcgcgggaacacgtacttctctgcgcgatgaaaatggtcaggcgatccgtgttgaaacatccatgccgcgtgcgcttgaactggaagagattccaagtatcgtcaatgatttccgtcaggctattgctaacgcgcgtgaagccggttttgatctggtagagctccactctgctcatggttatttgctgcatcagttcctttctccttcttcaaaccatcgtaccgatcagtacggcggcagcgtggaaaatcgcgcacgtttggtactggaagtggtcgatgccgggattgaagaatggggtgccgatcgcattggcattcgcgtttcgccaatcggtactttccagaacacggataacggcccgaatgaagaagccgatgcactgtatctgattgaacaactgggtaaacgcggcattgcttatctgcatatgtcagaaccagattgggcggggggtgaaccgtatactgatgcgttccgcgaaaaagtacgcgcccgtttccacggtccgattatcggcgcaggtgcatacacagtagaaaaagctgaaacgctgatcggcaaagggttaattgatgcggtggcatttggtcgtgactggattgcgaacccggatctggtcgcccgcttgcagcgcaaagctgagcttaacccacagcgtgctgaaagtttctatggtggcggtgcggaaggctacactgattacccgacgttgtaatccaacattgcgagcggcgtaaagccgccgctatactaaaacaacattttgaatctgttagccattttgaggataaaaagatgcgtcttcttcataccatgctgcgcgttggcgatctgcaacgctccatcgatttttataccaaagtgctgggcatgaaactgctgcgtaccagcgaaaacccggaatacaaatactcactggcgtttgttggctacggcccggaaaccgaagaagcggtgattgaactgacctacaactggggcgtggataaatacgaactcggcactgcttatggtcacatcgcgcttagcgtagataatgccgctgaagcgtgcgaaaaaatccgtcaaaacgggggtaacgtgacccgtgaagcgggtccggtaaaaggcggtactacggttatcgcgtttgtggaagatccggacggttacaaaattgagttaatcgaagagaaagacgccggtcgcggtctgggcaactaatctcctgccgggcgcgaactcatcgcgcccgcatctttactgcatcgacaagtaatatttgtcataatgcgcgctgcaatttatccgtattaagagaatcagatgtccgataacgctcaacttaccggtctgtgcgaccgttttcgtggcttttatcctgttgtgatcgatgttgaaacagctggatttaacgccaaaaccgatgcgctgcttgagattgccgccatcaccctgaaaatggatgaacaaggctggctgatgccggacaccacattacatttccacgtcgaaccatttgtcgnnnnnnatttgcaaccagaagcccttgccttcaacggcattgacccgaacgatcccgatcgcggcgcggtcagcgaatacgaggcgctgcacgaaatttttaaagttgtacgtaaaggtattaaagcgagcggctgtaaccgcgccattatggtggcgcacaacgccaatttcgatcacagctttatgatggccgccgcagaacgcgcctcactgaaacgtaacccgttccaccctttcgccacttttgacactgctgcactggccgggctggcactcggacaaaccgtattgtcaaaggcttgccagaccgctggcatggacttcgacagcacccaggcgcactccgcgctgtacgacaccgaacgcactgcggtgctgttttgtgaaatcgtcaaccgctggaaacgtctgggaggctggccgctacctgccgccgaagaggtgtaatcgagtcgatgcctgatgacatgcaatgattcaggcatctatagtgaggctattccacgcatcatgcatgatattcacggggaatagcgttaatggcagataatccaaacccttcatcgcccctgccggacgtgttttcaccggcgacccgcgactggtttcttcgcgcctttaaacagccgaccgctgtccagtcgcaaacctggcatgtggcggcgcgaggcgaacatgcgctggtgattgcaccgactggctccgggaaaacgctggcagcatttctctacgccctcgatcgactcttccgcgaaggcggcgaagatacccgcgaggcgcataaacgtaaaacctcacgcatcctctatatttcaccgataaaagccctgggcaccgacgttcagcgcaacttgcagatcccgttgaagagtattgccgatgaacggcggcggcgcggcgaaacggaagtcaatcttcgcgtggggatccgtactggcgatacgcctgcacaggaacgcagcaaactcacccgtaatccgccggatattctgatcaccacacccgaatcactctatctgatgctgacctcccgcgcgcgcgnnnngctacgcggcgtcgaaacggtaattattgatgaagtccacgcggtagcgggcagtaaacgtggtgcgcatctggcgttaagtctggagcggctcgatgcgctgctccacacctcagcacagcgaattggcctttctgccactgtgcgctcagccagcgatgtggcagcatttcttggtggcgatcgcccggttacggtagtcaacccgcccgcaatgcgtcatccgcagatacggattgtcgtaccagtcgccaatatggatgatgtctcatcggtcgccagcggcactggcgaagacagccatgccggccgggaaggctccatctggccatatattgaaacgggtatccttgatgaagtgttgcgccatcgctcgaccattgtctttactaattcgcgggggctggcggaaaaactgacggcacgattaaatgagctttacgccgcacgcttacagcgttccccgtctatcgccgctgatgcggcccatttcgagtcgacctctggcgcaacctctaaccgtgtacaaagtagcgacgtttttattgcccgctcacaccacggctccgtctctaaagaacaacgagcaatcaccgagcaggcgctgaaatcgggtgagttacgctgcgtggtcgcaacttccagtctcgaactggggattgatatgggcgctgtggagctggtgattcaggtggcaacgccgctttctgttgccagtgggttacaacgcattggacgtgccggacaccaggtaggaggtatctccaaagggctttttttcccccgaaccaggcgtgacttagtcgattccgcagtcattgtagagtgtatgttcgcaggcaggctggaaaacctgacacctccgcataatccactcgacgtccttgcgcagcacaccgttgnnnncgcggcgatggatgcattacaggtagacgaatggtactcccgcgtacgccgtgccgcaccgtggaaagatctgccaagacgtgtttttgacgccacgctggatatgctttccggacgctatccctctggcgatttttctgcttttcgccccaaactggtctggacagggagaccgggatattgaccgcccgacctggcgctcagctgttggcggttaccagcggcggcaccattccggatcgtggcatgtatagcgtgttattacccgaaggggaagaacaggccggttcgcgacgggtgggtgaactggatgaggagatggtatatgagtcgcgggtgaacgatattatcactctcggcgcaacctcatggcggatccagcaaatcacccgcgatcaggtgattgtgactcctgctccgggtcgttctgcccggctccccttctggcgtggtgaaggtaacggacgtccggctgaattaggcgagatgatcggcgattttcttcatttgctggcggatggagcgttcttttccgggactattcccccgtggctggctgaagaaaatacgatcgccaatattcaggggttgattgacgagcagcgcaacgcgacgggtnnnnnnggggagtcgtcatctggtcctcgaacggtgccgtgatgaaattggcgactggcgtattattttgcactctccctatggaagacgggtgcatgaaccctgggcgctggcgattgccgggcgaatacatgcgctttggggcgctgacgcgtctgtggtcgccagtgatgacggcattgttgcgngcattcctgacactgatggtaaattgcccgacgccgcgatttttttgtttgaaccagaaaagttgctgcaaattgtccgcgaggcggtaggcagttcggcacttttcgccgcccgttttcgcgaatgcgccnnnnnnnnnnnnnnnntgccgggccgcacgccgggccatcgcaccccgctttggcaacaacggctgcgcgccagtcagttgctggaaatcgctcagggatatccggattttccggccattctcgaaaccctacgcgaatgtctgcaagatgtttatgatcttcccgcactggaacgtttgatgcgtcgcctgaacggaggcgaaattcaaatatccgatgtaacgactactacgccctcgcctttcgccacaagtttattgttcggctatgtcgcggaatttatgtaccagagcgacgccccgctggcagaacgccgggcatccgtactgtcgctggacagcgagttactgcgcaatctactcggacaggtcgatccgggggaattactcgacccgcaggtcattcgccaggtggaagaagagttgcaacgactggctcctggcagaagagcgaaaggtgaagaaggattgttcgacctgctgcgcgaactggggccaatgaccgttgaagacctggcgcaacggcatacaggcagcagtgaagagattgcctcgtatctggaaaatcttcttacagtaaaacgcatcttcccgacgatgattagtggacaggagcgtcttgcctgtatggatgatgccgccaggctgcgcgatgccctcggcgtacgattaccagagtcactgccagagatttatttgcatagagtcagttacccgcttcgcgacctctttctacgctatctccgggctcatgctctggtcacggctgaacaactggctcatgagtttagtctcggtattgccattgtcgaagagcagcttcagcaactgcgcgaacagggtctggtgatgaatctgcaacaagacatctgggtgagcgatgaagtatttcgtcgtctgcgtttgcgctcgctgcaagccgccagagaagcgacgcgtcccgttgcagccacgacctatgcgcgattgctgctggaacgtcagggcgtattacccgccaccgatggtagcccggcgctctttgcctcaacatcgccaggcgtttatgagggggtggatggcgtgatgcgggtgatcgaacagcttgccggagtcggcttacccgcctcactctgggaaagccagatcttgcctgcccgcgtacacgactattcgccagaagtgctcgatgaattactggcaaccggtgcggttatctggtcggagcaaaaaaaactgggtgaagatgacggcctggtggcactgcatctacaggaatatgctgcagaatcgttcactcccgccgaagcggatcaggcgaatcgttcggcgctgcaacaagcgatagtcgctgttctggctgacggaggagcctggtttgcacaacaaatcagccaacggatacgcgacaaaatcggcgaatcggttgatccctcggcactgcaagaggcgttatgggcgctggtctggcaaggcgtcatcaccagcgatatttgggcaccgttacgcgccctcacccgcagcagttccaacgcacgcacctcaactcgccgcagtcaccgggctcgtcgtgggcgtcctgtctatgcacaacccgtctcgccgcgggtatcttacaacacaccaaatctggctggacgctggtcgttattgcaggtggagccactaaacgataccgaaaggatgctggcgctggcggaaaatatgctcgaccgctacggcatcatcagtcgtcaggcggtgatagccgaaaatatccctggcgggtttccatcgatgcaaacgctttgtcgaagtatggaagattccgggcgaattatgcgaggtcgttttgtagaaggtctgggtggcgcgcaattcgctgaacgtctgactattgaccgcttgcgcgacctggcgacacaagccgcgcaaacgcgccactatacaccagtggcgctctccgccaacgatccggctaatgtgtggggaaatcttctgccctggcctgcacatccggcaacgctggtaccaacgcgtcgggcgggtgcgctggtggtcgtttctggcggcaaattgttactctatctggcgcaaggtggcaaaaaaatgctggtctggcaggaaaaagaggaattactcgccccagaggttttccacgcgctgactaccgcactgcgtcgcgaaccacggctgcgctttacgctaacagaagtgaatgatctaccggtctggcaaacgccgatgtttacgctgctgcgtgaagcgggattttcaagttcgccacaagggctggattggggatagagaaaggactgacggatgcccgttcgcatccgtcagtattgcaggacggattattccgcgtccggctcttcagacttgtatttagcggcagtttctttgatcagctgctgcagttcgccacgctgatacatttcgatcacgatatcacaaccgcctaccagctcgccgtcaacccacagttgcgggaaggtcggccagttagcatatttcggcagctccgcacgaatgtccggattctgcagaatatcaacataggcaaaacgttcgccacatgcggcaagcgcctggactgcctgggcagagaaaccgcagctcggcagtttcggtgaacctttcatgtacagcaggatcgggttttcagcaatctggcgttggattttttcgatagtggtgctcattgtcttgcttcctcaaacttctttacggcagtaatctgacattgtagcgggtcagtgcggcatcggaaaataacattttcatcacgcttttgctattttatccctttgctctatttgttgcatttcaaatattcgtttcttccctgatgcacggcaaactggcgtatttatgaccatttttagctttcactgctgcatttttttgcgctcgccaacgaaacgtattttttaacaataaaagctattaactttctcttcttctatgcattagaatcatcaagttttgtaaatcagacgcaggcatgatagacctgccttaacagagggacgctcagtggcgcggataaaccgtatttcgatcacgctctgtgctttactttttaccaccctgcctttaacgcctatggcccatgcttcaaagcaagccagggagagttctgctaccactcatatcaccaaaaaagcagataaaaagaaaagcacggcaaccaccaaaaagacccagaaaacagcgaaaaaagccgccagtaaaagtacgaccaaaagcaaaaccgcttcttccgttaaaaaatcttccattaccgcttctaaaaacgccaaaactcgcagcaaacataccgtcaataaaacggcctcagccagctttaccgaaaagtgtaccaaacgtaagggctataaatcgcattgtgtgaaagtcaaaaatgcagcgtcaggaacccttgccgacgcacacaaagcgaaggtgcaaaaagccacaaaagtggcaatgaataaactgatgcagcaaattggtaagccatatcgttggggtggcagctcaccgcgtaccggttttgattgcagcggcctggtttattacgcttataaagatttggtgaaaattcgtattccgcgtacggcgaatgaaatgtatcacctgcgcgatgcagcgccaatcgaacgtagtgaactgaaaaacggcgacctggtctttttccgtactcagggacgcggtacagccgatcatgtcggcgtgtatgtcggcaacggcaaatttattcagtcaccgcgcacaggtcaggaaattcaaatcacttctctcagtgaagactactggcagcgccactatgttggcgctcgccgggtaatgaccccaaaaacacttcgctaaaactttaccctgttgttacggcaacagggtaagttcatcttttgtctcaccttttaatttgctaccctatccatacgcacaataaggctattgtacgtatgcaaattaataataaaggagagtagcaatgtcattcgaattacctgcactaccatatgctaaagatgctctggcaccgcacatttctgcggaaactatcgagtatcactacggcaagcatcatcagacttatgtcactaacctgaacaacctgattaaaggtaccgcgtttgaaggtaaatcactggaagagattattcgcagctctgaaggtggcgtattcaacaacgcagctcaggtctggaaccatactttctactggaactgcctggcaccgaacgccggtggcgaaccgactggaaaagtcgctgaagctatcgccgcatcttttggcagctttgccgatttcaaagctcagtttactgatgcagcgatcaaaaactttggttctggctggacctggctggtgaaaaacagcgatggcaaactggctatcgtttcaacctctaacgcgggtactccgctgaccaccgatgcgactccgctgctaaccgttgatgtctgggaacacgcatattacatcgactatcgcaatgcacgtcctggctatcttgagcacttctgggcgctggtgaactgggaattcgtagcgaaaaatctcgctgcataataactgatggcaaatgcagtattgcctgatgcgcttcgcttaccatgccaacgcggatgaggcgttaacagcgcattcggcaagataaatcgcacgttgtcagcaactgtaacgcagaaggttatccttctgcgtttttgtttaattagctgttagcaacgcaaactgtttcaggttgttttctggctgacataaacaccagcaataatgccagtcccgcgacaatcgcccccatcaccggcacaaagctgtatcccagcccagcggaaattaccgcaccaccagcagctgctcccagcgcatttccaagattaaaggcaccaatattgactgatgaagacagacctggcgcttcactggcgacacgcatcacgcgcatctgtaacggcggtacgaccgcaaaggttgcagcgccccacaccaccatgctaatagctgcgccgaactcattgcgggccaggaacgggattgccagcataatcaccatcagcagcaacaaaaagcctttcaacgtgccgttaactgaacgatctgccagtttgccgccgagatagttaccgatagagaatccgacaccaatcagcaccagcattgccgtgacgaacaccggtgttgcgtgggtaatactttgcagtaccggagagatataggtgtagagagtaaacattgcaccagctcccagtaccgtcgtcagcaatgcagacagcacctgcggacgcattaataccgccagctcttttttcacttcaggtcgtgcccctgcaccacctttaggtaatgagaagaacagacttaccattgaaatcactcccagccccgccgttgccagaaatgacatccgccagccgatggtttcacccaaccaggtcgccgccggcacgccaccgatatttgccagggttaaccccataaacatagtggcaactgcgctggcctgtttatgttttggcaccacgcttgcggccacgactgaacccaaaccaaaaaatgctccgtgattcaggctggtcaaaatgcgtgaaagcatcagggtcatataatccggcgcgatggcggaaagtacgttgccgagcgtgaaaattgccatcaggaaaatcaacgcactgcggcgggcacgatgagaaagtagaagcgtcatcagcggcgcgccaaccattacgccaactgcataggcactgattaacattccggcagcgggaatcgagacatccacaccgcgcgcaatgacgggcaacaagcccattggcgagaactccgttgtcccgataccaaacgcgccaatcgccagcgccagcaacggatagttaattttcatgccttatctccacctcttcgcgtcattacgcgatattcattaaagtggcgaaagcatgacagcaatcacaaaaaaatgaaaataacaaaaagagaaaacacttttgccattttgctaacaaacaggaaggagatgcgagggagaacgcgctccctcgagaggaaatcagtgcagcgcggcagtcaaacccacggccacgatcaaaccgaggacgataatcgttgttaccagtgaaaatttaaggtcggtgctcatcaagttttctccttttttattaccacacaaaaagtgatattacgcatttttacacactgtgatgaaaaaatctcccgtcatttataatgataagtgtttttaccacttccccttttcgtcaagatcggccaaaattccacgcttacactatttgcgtactggccattgaccccttcctgacgctccgtgtcgtttttccggcgtaccgcaacacttttgttgtgcgtaaggtgtgtaaaggcaaacgtttaccttgcgattttgcaggagctgaagttaggggctggagtgaaatggaatggcaacaataaaagatgtagcgaaacgagcaaacgtttccactacaactgtgtcacacgtgatcaacaaaacacgtttcgtcgctgaagaaacgcgcaacgccgtgtgggcagcgatcaaagaattacactactcccctagcgcggtggcgcgtagcctgaaggttaaccacaccaagtctatcggtttgctggcgaccagcagcgaagcggcctattttgccgagatcattgaagcagttgaaaaaaattgcttccagaaaggttacaccctgattctgggtaatgcgtggaacaatcttgagaaacagcgggcttatctgtcgatgatggcgcaaaaacgcgtcgatggtctgctggtgatgtgttctgagtacccagagccgttgctggcgatgctggaagagtatcgccatatcccaatggtggtgatggactggggtgaagcaaaagctgacttcaccgatgcggtcattgataacgcgttcgaaggcggctacatggccgggcgttatctgattgaacgcggtcaccgcgaaatcggcgttatccccggcccgctggaacgtaacactggcgcaggccgccttgccggttttatgaaggcgatggaagaagcaatgatcaaggtgccggaaagctggattgtgcagggtgactttgaacctgaatccggttatcgcgccatgcagcaaatcctgtcgcagccgcatcgccctactgccgtcttctgtggtggcgatatcatggcaatgggcgcactttgtgctgctgatgaaatggggctgcgcgtcccgcaggatgtttcgctgatcggttatgataacgtgcgcaacgcccgctattttacgccggcgctgacaacaatccatcagccaaaagattcgttgggtgaaacagcgttcaacatgttgttggatcgtatagtcaacaaacgtgaagaaccgcagtccattgaagtgcatccgcgcttgattgaacgccgctccgtggctgacggcccgttccgcgactatcgtcgttaatcacccgttgcgggagtctcttccggctcccgcagccactccttattcagcgtctcactatcgccgagatactcaagcaaccaggttaacgcaggcgacatatcattttgctgccatgtcagacaacatgccgaatccggaaaggggttttccagttctaatgctacccacttcccctcattaagccacggtttggcgaaatgtgttggcaccatccctatgcataatcctgccgagatacaggttgccgatgattcccagtcaggcacgacaactcttttttggttatccagcaaccaggtaatacgcttaggtagcgttcgcgaggtgtcttcgcgcaccaacgacggccagttgngcaacgtatcatcgctgaacgggccatccatcaacgccagcgggtgatggctggcaacaacgcaactccagcttagcatccccatatcccggaaggcataacgaccgcctaccggaatcgcgcgtgttgcgccaatcgccagttccacgcgcccgtcggaaagcgcatcccagacaccgttgaacacttcctgaaagacaagaagttcgacatcatcaaaatggcgataaaaatcaacgatcatctgccgtgtacgttctggcctgacaatattatccactgcgatagctaactgaccgcgccagccgttcgctatctgctgacattgctggcgggtgatctgcatttttttgacaacagagagcccttctttgagaaaccacgctccggcagcggtcagctccacatcacggtgccgtcgttcaaacagcggcaccgccagccactcttccagctgacgcacggtatagctgaccgcagaaggaacgcgatgcagctcctgtgccgcagcgctaaaactaccattacgcgctaccgcatcaacaacttcgagtgaatattctgaccacatagtctgcctgcaaaatttttgaaaccagtcatcaaatattaccgtttcacaacactaatttcactccctacactttgcggcggtgtttaattgagagatttagagaatatacatgcaacctgggaaaagatttttagtctggctggcgggtttgagcgtactcggttttctggcaaccgatatgtatctgcctgctttcgccgccatacaggccgacctgcaaacgcctgcgtctgctgtcagtgccagccttagtctgttccttgccggttttgccgcagcccagcttctgtgggggccgctctccgatcgttatggtcgtaaaccggtattattaatcggcctgacaatttttgcgttaggtagtctggggatgctgtgggtagaaaacgccgctatgctgctggtattgcgttttgtacaggctgtgggtgtctgcgccncggcggttatctggcaagcgttagtgacggattattatccttcacagaaagttaaccgaatttttgcgaccatcatgccgctggtgggtctatctccggccctggctcctctgttaggaagctggctgctggtccatttttcctggcaggcgattttcgccaccctttttgccattaccgtggtgctgattctgcctattttctggctcaaacccacgacgaaggcccgtaacaatagtcaggatggtctgacctttaccgacctgctacgttctaaaacctatcgcggcaacgtgctgatatacgcggcctgttcagccagtttttttgcatggctgaccggttcaccgttcatccttagtgaaatgggctacagcccggcagttattggtttaagttatgtcccgcaaactatcgcgtttctgattggtggttatggctgtcgcgccgcgctgcagaaatggcaaggcaagcagttattaccgtggttgctggtgctgtttgctgtcagcgtcattgcgacctgggctgcgggcttcattagccatgtgtcgctggtcgaaatcctgatcccattctgtgtgatggcgattgctaatggcgcgatctaccctattgttgtcgcccaggctctgcgtcccttcccacacgcaactggtcgcgccgcagcgttgcagaacactctgcaactgggtctgtgcttcctcgcaagtctggtagtttcctggctgatcagtatcagcacgccattgctcaccaccaccagcgtgatgttatcaacagtagtgctggtcgcgctgggttacatgatgcaacgttgtgaagaagttggctgccagaatcatggcaatgccgaagtcgctcatagcgaatcacactgatctatatcgatatacttatacttaggctgctaacaaaattttgttgtatgattgaaattagcggcctatactaatttcgagttgttaaagctacgataaatattatgtttttacggggacaggatcgttcccgactcactatggatggtcatttcggcaagggttcctcctttccctctgttctacgtcggattatagactcgcggttttttctgcgagatttctcacaaagcccaaaaagcgtctacgctgttttaaggttctgatcaccgaccagtgatggagaaactatgagttcatcgtgtatagaagaagtcagtgtaccggatgacaactggtaccgtatcgccaacgaattacttagccgtgccggtatagccattaacggttctgccccggcggatattcgtgtgaaaaaccccgatttttttaaacgcgttctgcaagaaggctctttggggttaggcgaaagttatatggatggctggtgggaatgtgaccgactggatatgttttttagcaaagtcttacgcgcaggtctcgagaaccaactcccccatcatttcaaagacacgctgcgtattgccggcgcccgtctcttcaatctgcagagtaaaaaacgtgcctggatagtcggcaaagagcattacgatttgggtaatgacttgttcagccgcatgcttgatcccttcatgcaatattcctgcgcttactggaaagatgccgataatctggaatctgcccagcaggcgaagctcaaaatgatttgtgaaaaattgcagttaaaacctgggatgcgcgtactggatattggctgcggctggggcggactggcacactacatggcatctaattatgacgtaagcgtggtgggcgtcaccatttctgccgaacagcaaaaaatggctcaggaacgctgtgaaggcctggatgtcaccattttgctgcaagattatcgtgacctgaacgaccagtttgatcgtattgtttctgtggggatgttcgagcacgtcggaccgaaaaattacgatacctattttacggtggtggatcgtaatttgaaaccggaaggcatattcctgctccatactatcggttcgaaaaaaaccgatctgaatgttgatccctggattaataaatatattttcccgaacggttgcctgccctctgtacgccagattgctcagtccagcgaatcccactttgtgatggaagactggcataacttcggtgctgattacgatactacgttgatggcgtggtatgaacgattcgtcgccgcatggccagaaattgcggataactacagtgaacgctttaaacggatgtttacctattatctgaatgcctgcgcaggtgctttccgcgcccgtgatattcagctctggcaggtggtgttctcacgcggtgttgaaaacggccttcgagtcgctcgctaaaggctattctatcgccccctctccgggggcgatttcagatcaggcttctgtacctggttgattcatggcattttctcgtgccgccagcacacgttctaccgtatctaccactgcctgagtttgtggatcgatttcaatgttgacgcgtgcnccaagttttttcttcccaagagtcgtgcgttccagagtttccggaattaaatggacgcaaaaacgcgttggcgtgacttcgccgacggtcaggctaataccgtcgatgccaataaatcctttgtacaggatatatttcatcaactgactatcctggactttaaaccagatctggcgattattttccgaggttaatattttcgccacttcagcggtggtcataatatgacctgacattaagtgtccgccaatttcatcactgaatttcgccgcacgctcaacgtttacccaatcccccactttaaaatcgccaagattggtaatgcgcaacgtttctttcatcaggtcaaaactgacatggttgccgttaatttccgtcacggtcaggcagcaaccgttatgcgccacggaggcaccggtttccagaccgtccagcatgtggtcgggtaactccaccacatgtgtgcgaaaatttggtttctcgtcaatcgacaccagttttgcggtgccctgtacaatccccgtaaacatacttacaactcctgaaatcagttaagacattctgttcagcacaatagcaggtggaaaacgcccttaccagtgaaggggtaagaatggctattttttcactggnnnnnnnnnnnnaatcctcgctacaatagactgaatttcccctgcttcttctttttgctgcctattcaggcggctttttagtctctcatataactacaaataaaaggtgttcacgtgcagaagtatatcagtgaagcgcgtctgttattagcattagcaatcccggtgattctcgcgcaaatcgcccaaactgcgatgggttttgtcgataccgtgatggcgggcggctatagtgccaccgacatggcggcggtcgctatcggtacttctatctggcttccggcgatcctctttggtcacggactgctgctggcattaacgccggttatcgcgcaattaaatggttccggtcgacgtgagcgcattgcgcatcaggtgcgacagggcttctggctggcgggttttgtttccgttctcattatgctggtgctgtggaatgcaggttacattatccgctccatggaaaacatcgatccggctctggcggacaaagccgtgggttatctgcgtgcgttgctgtggggcgcgccgggctatcttttcttccaggttgcccgtaaccaatgtgaaggtctggcaaaaaccaagccgggtatggtaatgggctttatcggcctgctggtgaacattccggtgaactatatctttatttatggtcatttcggtatgcctgagctcggtggcgttggttgtggcgtggctactgcggcggtgtattgggtcatgttccttgccatggtttcttacattaaacgcgcccgctcgatgcgcgatattcgtaacgaaaaaggcaccgcgaaacccgatcctgcggttatgaaacgactgattcaactcggtttgccgattgcgctggcactattctttgaagtgacactgtttgccgtcgtggctctgttagtgtctccgctcggtattgttgatgtcgcaggacaccagattgccctgaactttagttcactaatgttcgtgcttccaatgtcgctggcggcagcggtaactatccgcgtaggttatcgtctgggtcagggctcaacgctggatgcgcaaaccgctgcgcggaccgggcttatggtgggtgtctgtatggcaaccctgacggccatattcacggtttcactgcgggagcaaatcgccatgttgtacaacgacaatcccgaggttgtaacgctggcggcgcatttgatgttgctggcggcggtatatcagatttctgantcaatccaggtgattggcagtgggattttgcgtggttataaagatacgcgttccattttctatatcacctttacggcttactgggtgctgggcttgccaagcggctatattctggcactgaccgatctggtcgttgaacctatggggccagcaggcttctggataggctttattattggcctgacgtcggcagccattatgatgatgctgcgtatgcggttcctgcaacgtctgccgtcagccatcattctgcaacgagcatcccgctaataaagacaaggcgcaaccttcacggggtgcgcctgtgtttttacgcaggctggagcgttgcgccaatcccgtcttcgtctggctgtagtttcagtgcgttacacagagtttgccgactggcatctgttatctgaacgcgtatatccccgttaacttcccctttcacattgatgaagtcaggtgaaatttctttcgcactggtttgcaggcaaatcgctccctctccgcgcaggcgtttcactttcagctgcacatgcgttgccgcaccagtgatcagccacagttttccgccattcagattgatgttaccaatactgaaagtgacactgtcaccttttaccgtactgccgtcgagaatcaatacaccgccctgctgtacagtaatcgttgattgttgcagatctgcgccatagccaataatcattgaagcgccgtccagtaatgcaacactcccggtcagttcaaccggtgcgcgatcttcctctacgacaaaattttcgtccgcgctggtgggtgacaacaggatcactgttccaccttgtattaccgcattttccagcgtaccggcatgcacttcagcccgaccacccacattaacggacaggttttgcgtcttaccgtaactgtagagctgaagaccatccgtccccagacgatagatggctccattctcaacaatagtgtcagagtcttcaccaccgagattattcatggtgccatcagcaagcaacgtatcattggctttccccgccagcataaaaacgccgccctgattaatctcacaattgctggcttccccacctggatacaccaacaattcaccaccttcatctaccacgaccgctgaggttgtcccattaaccaacaggccgccctcttgatcgagaatgattttttccgcgcgatgtccttccagtacacgcaggttaccgccattttccagcaacaaaccgcaggcataaccctgatcaacgctgaattcaccttcgggatggcggccattaaccgtagcgagcgtagagagactaattgcgcctccctcggactgaacaatatctgtggcaatggcaccgtcgctgaccgatagcgtgccattgttaccgtactgtgtgcatttggcgatcccaccggttgccactttcaaccagccagcccccgtgaccacggtattttcggctcttccgccagcttcaacaatcaactcgccttcagtaagttgcgtcgcgccaatgacctcgccggtcttaacaatttgcacattcccgtcgctcatcaagtttttcgcatcagatcccatgatttattcctttgctgcatctgtgtgcctttattgctacctaagtgtaaaggctacggaggatttatccacgacagatttgagatggtggcaaacaactctgtttaaactctgatacacgaattattgggttgtatcagatgtaaatgcgatcctgaataaaaatcgcccttgcaaatcaacaaaatatagccaatttgcttaaaagctctgcaaacggtcgaaatagcgcagaaaattacgttttgcctcttgccaccttcccactctgccgctaatattcgtccccgttgtcacctacaacgttgcgttcatagctcagttggttagagcaccaccttgacatggtgggggtcgttggttcgagtccaattgaacgcaccatcctgcgtccgtagctcagttggttagagcaccaccttgacatggtgggggtcggtggttcgagtccactcggacgcaccagattttcttaatctggtcttctcctttttccctctgcttcttctctgtatccaatacgttaaaagatttacactgtcttcgtatgcgttatcagaaggagaatcgctatggcaactttgttacaacttcattttgcttttaatggcccatttggcgacgcaatggctgagcagcttaaaccacttgcagagtcgattaatcaggaacctggttttctgtggaaggtatggacagaaagtgaaaagaaccacgaagccggtgggatctaccttttcactgatgaaaaaagcgcccttgcctatctggaaaaacacactgcccgactgaaaaaactcggcgttgaggaagttgtcgccaaagttttcgatgtcaatgagccactgagtcaaatcaatcaggcaaaactcgcctgacagaatttaatcaagggcggttagcgcccttttcatccctgtctgaaatttctcaaattctaaaaatctcaaccaaacttatctgataacactaaattcgaaagaatgcgtacaggtaagtaacaatgaaaaaaattgcaattgtgggtgccgggcctacggggatctacaccttattctcgcttctacagcaacaaactccactttctatttctatcttcgagcaggctgacgaggccggtgtcgggatgccatacagtgatgaggaaaactcaaaaatgatgctggcaaatattgccagtattgaaataccgccgatttattgtacgtatctcgaatggctacaaaagcaagaagccagtcatctccagcgttatggcgttaaaaaagaaaccttgcacgatcgtcagtttttaccgcgaattctgctgggcgaatatttccgcgatcaatttttacgattagtagaccaggcacgaaagcaaaaatttgcagtggctgtttatgaatcatgccaggttaccgatctgcaaattacaaatgctggcgtcatgctcgctacaaatcaggatttacccagcgagacgtttgatttagcggtgatcgccacgggtcacgtctggcctgatgaagaagaagcaacccgaacgtattttccaagcccgtggtcaggcttgatggaagcaaaggtcgatgcgtgtaacgtgggtattatgggaacatccttgagcggactggatgcggcaatggcagtggctattcagcatggttcgttcattgaagatgataaacaacacgtcgtttttcaccgcgataacgcaagtgaaaagctaaatattacgttaatgtcgcgcacgggtattttacccgaagccgatttctattgccctattccctacgagcccttacacatcgtcactgatcaggcattaaatgctgagattcaaaaaggcgaatatggccttttggatcgggtatttagattgatagtagaggaaatcaagtttgctgatccagactggagtcaacgcatagccttagagagcctgaatgtcgattcctttgctcaagcctggtttgccgagcgcaaacaacgcgaccaatttgactgggcagaaaaaaatctccaggaagtcgaacgcaataaacgagaaaaacatactgttccctggcgttatgtcattctgcgcctgcatgaagccgtacaggaaattgttccacatctgaatgaacacgaccataaacggttcagtaaaggccttgcccgggttttcatcgataattatgcggcaatcccttcagagtctattcgtcgcctacttgccttacgtgaagcgggaatcattcatattctcgctctcggtgaagactacaaaatggaaattaacgagtcgcgcaccgtcctgaaaacggaagacaacagctactcgtttgacgtttttattgatgcccgcgggcagcgtccgcttaaagtgaaagatattcctttccctggactacgcgaacaattacagaaaacaggggatgaaatccctgatgttggtgaagattatacgttacagcaacccgaagatattcgtgggcgcgtagcgttcggcgcgttgccctggttgatgcacgaccagcctttcgttcaaggacttacggcatgtgcagaaattggtgaggcgatggctcgggcggtcgtaaagcctgcatcccgtgctcgtcggcgtctttcgtttgattaaaggtaaagctatcagcactcaacaaactgatgctgttcattaagacgatagcggactccggctcgaatattgttttcaccttcaatggcgacggcgaagcgaactctttcgccgtcatgatatgccagtgcggcgctgccccctggcccgagaataattgagtcgaccacgcccgtgctcactaccgttgaattttcaccgctggcaatgatgtgtacattgtcgccgctgttggcaattctggcgtttgcgccaaagctggcgatttgcaccaggtcaccattactggcgacatgacaccgtttacccaatgtacaaacgcgtactcgcattccggtattcgcaatccgactgctatctccagcgctgcttatccgcgaagaattgccggttactgcaacccgtgcgcgctcaccggagctgccaatgtgactgttaaagccgacacttccaatccgcacgctataacccatactggcaatttgtgcagcatacccagcggttgcgattctggcgttatcctcacaacagccgatgcgagcatgatcgtcgctgcgggcaaactgactgcaaaatgctctctctccggggtctgtggccagtttttgcatagaggaaacttcctgatgcgcgaagttttcatccgccagccattttttccacgcatactcaaccagactctccgcccagtccgtatatccttcctcaatcagtgcatgatgaatatcggcataactaccgccgcgtgggaaatggcgcaggaaccagcgatacatcaccgctccgatacgccattctcgcaggtctgctcgtgtaatgatcattcgttagtgccggtgatagccatcgaccatgcttttaaaggtttcgtgtggcgnacgccccgtggtgcaaagataaagatgaccgaagataaaaaagaggcttataaatgccagagcaaaatgcgcctgcaataaccagtatcttacgccaggaaacacatctcccacggcttgcggatagagacacagcagccccgtcaatagtaacaacggcagcaatccatacatgacaccaacataggcaacctgctgtaagggattaaatttagactgggttgttgccgggaaaggatgttcttccccctgcataatgccaaacaaataaaatcgngtttgttttgccgcccgctccagccaaccctgacgacgaatgcgatagtggtggccattacccccaacgccattgatcagaacaaagccgagccagcatgccagtaacaaaaatccgcaaacttcatgcaccgcaaccagacttttaaccgcagttgcgcccaccagcgcaaagtgatttatcagcccacttgccagcaacaatacaaagagtaacgcattcgaccagtgccataatctgaccgctttgctgtaaagataaatcctctcaccatgatcggtggctgatttcttcacgccacgagcacgaagcaaggcgtgcagccccagcaccaaccacatcccaaccagcaatactccggcaatgatcaaccacaccggccaaaattcgggagtgaactgtggcacatagttcgctaactggctctgaaactgttcagcatgttgcgacgggttcatacattttcctttttaatcaaatgttgaccgaaccggcgatacagatgcggtttcccggcaccaggtagctgatattgatagtatttattatcctgcaaccacgcctgaatttcagggctatcttcgcgaccaaagatcaatgcgtgttccgggcaagcgctgacgcaaatgggcggaaagccttttgccagtcgggactcagcgcagaaatcacatttatctgccactttagtgacagggttaaggtagcgaacctggtacggacaagcgccaatgcaataactgcagccgatgcactgcgatttttctacccgcacgatcccctgctcatcacgccacgacgcccctgtcgggcatacgtcgatgcacggagcatcttcgcagtgctgacatgactggcgaaaaaagtgatactgcgtttcgttgtcgttatcggtgactggaatgtgtgctatcgataaacggcttccctgagcgggggcgtggttagttttacggcatgcgcgggcgcaaatattacagccattgcaccgtgactcgtcatgaatcatggcataccgaacttccttttcttgcctcgtgttcgctaacagagaagacgcagaaccagtaaaaaagattactgttcccatccccagaacaaatttgcgtcgagtgaaggacatctgattatcccctaatgcagtggctgcaactgtccaccctatccatgacatctccctgaaatttcaggggttctgaaactgctctacctcgaaccattcgcataagccataagccttgccataggtcataaatcgctcgctaaacaagtacaacaccgccgtcgatgactctacctgccgtatatcggcatattcaggtgcaacatccattgcggcgatcgcggcttcaatctgcgcttcctggaagtaatatggcgcttgcatcagcatggcgactttgtaaggacgaggatacgtctggcactcaaaacgaacggcgtgtgcaatggcgcgacaaatgtcctgctccacaacttgcaaagacatcgccgcgtagttttcactcatggcctgcgttgagtaatagtaatcatcctgacttcccgtcatacaagcgatatccgcgtagtctccgttctgcttgatgttttccagcaaaactgacagttcctcttctgcaactgaatagggtggcgagagaaacacggcgcgcgccaccagctgcccagccacagaatgctggcgaatgaactctgccaggatttcagccggttctggttcggttaccgtatcaacggggtgacgcatcccctgcaaccattgccgcttcgcctcgtcaacttcgctgactttcgctaacggcaattcatcctgatggttcatcttacccattccttacgcaggcagtagattgtgtgctgccagatcggcggcaatatcttccagccccagacgctgcaatgtttcgcgggtcggacaaccaagctgtgggtcccagcccatttctttgtagaacatcgtgagcgaggcatgcatatcatcacgatccattttgtcagtaccttcagtaaagaccgggatctgcggatccttgtcgaatacccaggaacagataagatcgtgttcattacgcatatctttggtttgcatcagtttcaccgtgtaggcacgatgcaatgtaaagatacgctctgcagctaaatctaatttttcctgagtcatctcttcgccagtgatcgctttgaagaatttggcttcaagcgccagatcgccccggtaattacggcttttcagcggcgaaacggtcattggccagacccagttgcacagggtgacggcgttatgcaaacagacccgcaacagcgaccacttagcatatttaatttttgcgtcattgattggcgtgtagtttttggtttcatcgtaagcatcttcagaaccaaaaagttctttcgccacttcacgttgcagtttcaatggcaagccggaaccaataaagttgatatgggtatgcgtcatgcagtcacggttgaacatacagttaacaatggaaccgacctgcgctgacgcttcattggcatggtgaaccggatagccaaacggcgaccagagtttatttttcgcgtagccccagtactcttcacccaaattccagcgttctgcgatggcatatgaaccatcagccaggtgactcagctcacccacacgatgcgccagacggtagtaaaaatctttaatgaagttaacgtctcccgcttccagttgatcccagcgaatttctgcatactcttcagcaggcagaacacgcttgaacacacctttgctgtaacaataagtaaagtcgcgatgcaactgcccgtagttacaccataggccgtagtcatcgaacaaattcagaccaaccaggttaccaatcacacgaccatcgtctttatcttcaaaatctttcggcccgttcgggaagatggtggtatggacaaagtttgctacacaagtgttaccacctgtgctgggcacgccaaactctttcacccgaggaatattcatttgggtcatacaacggatcgggcaagagtggcagccgctcatttttactgtgtatttctctgctgccggacctaagtcaaaaacggatttataggtacgaaagccgaccgtattctgattgcctggcggaatttcacccgtttcaattggaccgccttcagccgcgccccaaaacagccctttacgtgctgtccagcgtgacttgggatctgaatactctgcccacgattgcggcgtacttggcacgacatggttgttattcgcaccgataagttcagtcatcatgtaatcattgagacgcttcatctcctgacgatcggcaatgttgacccctttcgtcccttcaaccgcaatcgctttcaggtttttcgaacccattattgcgccagttcccgcaccgccgctgtggttacggctattcaacatgccagagagaggaacaaggttttccccagcctgaccaatagccgccacacaggtttccggactggtcaagcgacaaatttcttccgtcgttgcgcgcgtcccttttccccataagaaatctgctttttccaggctaactttgtcatctttaatcttcagccataccggtgatttcgccttcccttcgataataatgacgtcgtatccagcgaatttcatttgcnntnnnnnnnngccacccatatgggcatcgacgactaaatttcctttggtaaaaatagaaagtgaggtgatatttacgcgagaactacagggggcaccagatccagttaatgggccggtagcaaagactaatttattcgcttcatcgaaaggtttcgtgcctggcggtacttcgtcatacataattttgtagccgaagcccatgccaccgacaaaacttttaaacttactggaatcttcgagggtaatatttcctgtcgtgagattgactcttaatatattacctgtccaaccgttagtcatgattttttcctttgcaagattcacacagtaatatctttccactcgataatttttaacgcccctgttgggcaggcgtttgcgcattcaccgcataacacacatttcgaggattttttactttcggtatttacggtggccatcatccacgggcatgccgtagtacaggcgctacagccaatacaacgtttatgatcgacggtaatacagccttctttctgctgccaggtaatcgcaccaatcgggcagacgttcatgcattgcggctctttgcattgacggcaggtgtccgcggtatagttgagatcgccatacaggccgccgccagagccaaccccgttgtcgccaaagaaataattgcgatggattttgatacgggagaagaatgtccctactgagccatcgttgaagttggtacaagagatttcacagcggtggcaacccgtgcatcgcgctcgctgggtcaccagcacccctttgggtgtatttatcaaccctactgtgccgctatcaatatcttcctgtttgcaacccaaaagtgacagtaacgcaggggcaattgttagaccagcaaggccttttcctgatatacgcaagaattctaatcgcgttaagccaatatctaatagtggacgatcaaccgggttcatttatttcgcatcctcttcgcaaacacagtgctgacaattcagcagcctgatattaagcattcaactaatacgctgctgactctgtccccaacaccagatattttccctaacccgatagtgtatgagaaaagatttaacgccgataaactaatcctttatggttaggagaaaaaataatgtggttattctgggctcttaacattgatcattatcaattaaaattacaaagcaagaaattataagtgaactgatatttattatcatttgaaatgaatttaacttaagcgacaattatttgtgacggtcattgcagaaaataaannnnnnnnnatcgttannaattaaaacacatatcgaaattcgtataatttcagcagttgttatttagaatgattaactggaccgcaactgaagcaagaatatcaggatgaagcttatcgcctcatcctgaatggtcattttaccagtgcgttaatgacggtttccatcgcctgcttttccagctcactgcgctgaatgcgtttattggctaatgctgtacgtaatacgcctgcgataacaatatgctttggttcctgccccagatcgcgcatttccagcacaactttaccgacaactctgcacatttctcggtacagttcatcctcttttgtccgatttcccattctttatacctatttatcatgccaactatcagcatatatcaatctaaccaattaaacaaaaatcaaacaaaatcagacaaataacgcgataaattattttaactgtagcaattgagcgatgatgtatttatacaccggatgaactttcacttatcttcacagtgacaaccccggcaccagacgttgcgcaaacagcgaagtttttgcgtaaccttttccctggaacgttaaatctttgataacaatttattgtctaacaagttgtatattttttgaaacgctgtttttgttttccttttggattaatttcagcgtataatgcgcgccaattgactcttgaatggtttcagcactttggactgtagaactcaacgactcaaaaacaggcactcacgttgggctgagacacaagcacacattcctctgcacgctttttcgatgtcacctatccttagagcgaggcaccaccactttcgtaataccggattcgctttccggcagtgcgcccagaaagcaagtttctcccatccttctcaacttaaagactaagactgtcatgaaaaagaccaaaattgtttgcaccatcggaccgaaaaccgaatctgaagagatgttagctaaaatgctggacgctggcatgaacgttatgcgtctgaacttctctcatggtgactatgcagaacacggtcagcgcattcagaatctgcgcaacgtgatgagcaaaactggtaaaaccgccgctatcctgcttgataccaaaggtccggaaatccgcaccatgaaactggaaggcggtaacgacgtttctctgaaagctggtcagacctttactttcactactgataaatctgttatcggcaacagcgaaatggttgcggtaacgtatgaaggtttcacaactgacctgtctgttggcaacaccgtactggttgacgatggtctgatcggtatggaagttactgccattgaaggtaacaaagttatctgtaaagtgctgaacaacggcgacctgggtgaaaacaaaggtgtgaacctgcctggcgtttccattgccctgccagcactggctgaaaaagacaaacaggacctgatctttggttgcgaacaaggcgtagactttgtcgctgcttcctttattcgtaagcgttctgacgttatcgaaatccgtgagcacctgaaagcgcacggcggcgaaaacatccacatcatctccaaaatcgaaaaccaggaaggcctcaacaacttcgacgaaatcctcgaagcctctgacggcatcatggttgcgcgtggcgacctgggtgtagaaatcccggtagaagaagttatcttcgcccagaagatgatgatcgaaaaatgtatccgtgcacgtaaagtcgttatcactgcgacccagatgctggattccatgatcaaaaacccacgcccgactcgcgcagaagccggtgacgttgcaaacgccatcctcgacggtactgacgcagtgatgctgtctggtgaatccgcaaaaggtaaatacccgctggaagcggtttctatcatggcgaccatctgcgaacgtaccgaccgcgtgatgaacagccgtctcgagttcaacaatgacaaccgtaaactgcgcattaccgaagcggtatgccgtggtgccgttgaaactgctgaaaaactggatgctccgctgatcgtggttgctacccagggcggtaaatctgctcgcgcagtacgtaaatacttcccggatgccaccatcctggcactgaccaccaacgaaaaaacggctcatcagttggtactgagcaaaggcgttgtgccgcagctggttaaagagatcacttctactgatgatttctaccgtctgggtaaagaactggctctgcagagcggtctggcacacaaaggtgacgttgtagttatggtttctggtgcactggtaccgagcggcactactaacaccgcatctgttcacgtcctgtaatattgcttttgtgaattaatttgtatatcgaagcgccctgatgggcgctttttttatttaatcgataaccagaagcaataaaaaatcaaatcggatttcactatataatctcactttatctaagatgaatccgatggaagcatcctgttttctctcaatttttttatctaaaacccagcgttcgatgcttctttgagcgaacgatcaaaaataagtgccttcccatcaaaaaaatattctcaacataaaaaactttgtgtaatacttgtaacgctacatggagattaactcaatctagagggtattaataatgaaagctactaaactggtactgggcgcggtaatcctgggttctactctgctggcaggttgctccagcaacgctaaaatcgatcagctgtcttctgacgttcagactctgaacgctaaagttgaccagctgagcaacgacgtgaacgcaatgcgttccgacgttcaggctgctaaagatgacgcagctcgtgctaaccagcgtctggacaacatggctactaaataccgcaagtaatagtacctgtgaagtgaaaaatggcgcacattgtgcgccatttttttgtctgctatttaccactactgcgtcgcgcgtaacatattcccttgctctggttcaccattctgcgctgactctactgaaggcgcattgctggctgtgggagttgctccactgctcaccgcaaccggataccctgcccgacgatacaacgctttatcgactaacttctgatctacagccttattgtctttaaattgcgtaaagcctgctggcagtgtgtatcgcattgtctgaacgttctgctgttcttctgccgatagtggtcgatgtacttcaacataacgcatcccgttaggctccacggaatatttcaccggttcgttgatcactttcaccggcgttcccgtccgcacgctggagaacaaggctttaatatccggtgcattcatgcgaatacaccctgaactgacgcgcaaaccgacgctgtccggcgcactggtgccatgaatgaggtattcgccattaccatgcgcgaggcgcagtgcgtaacgtcctagcgggttatttggtccggcaggaacgactggcggtaatttaatgccacgctccagcgaacgttgacgaatgcctgccgtaggcgtccaggttgggttagggattttctgccccacacgcgtttccatcactggcgtttccagcccctgcaagccaatacctatcggataaacctgcncgatattttctcccggcggataataataaaggcgcagctctgcaaggttaacgataatcccctgacgcggcgcatcaggtaatancagttgcgaaggaatagttatcgtcgtaccgggttttggcaccggggcgatagtgttattggcttcaaggatcaacattgccgcagtatcaaaacgtcgggcgatggcctgaaggtttttatccccttcctgcaccgtatacgtttgattttgcccaaccagtcggcttccggttggtggtagcggataatcaaccgcccaggcagcntggatggcactaaaagcgccgataagcgtgagtgtaagcaaagacgcgcgtttcattgtaaacctcctgtatttgccggagactcacgctgaaacgtcggatggcgcttatgttcacctgaaaccgaaacactcctgtgcaggtcagtgtaaacattgaccatccggcaatgtgagccaaccggatgaaagctgtccctttagtttagctaagtgcagcggctttggcgcgaattgcgcgaatcatcgcttccagaccttgtgaacgagatggggtgagatgttgggtgagtgccattttttcaaaccacggacgcacatcgaaattgacaacatcctgcggcgtcatctgatcgtagagaataaagacgaccgcaataagccctttcacaatcgccgcatcgctgtcgccctgcaattcaataattccctgcgcattctgacgcatgacaatccacacctgactctggcagccctgaatgctattttgtgggcttctgtcttcgtcgcgtaattctggcagacgctggcccagctcaataatgtagagatatttctcttcccagttggcgcagcgtaaaaaattacgcagcaacttttctttatccggcaataaagccatagtgcctccctgttatcccagcagacggtgaatacgttgcagtccggtcaccagacgatccacttcttcatgggtgttatacatggccagcgacgcccgacacatagcagggacgttataataggccattaatggcatagcgcagtgatgtccggtacgcacagcaatgccgtaattatcgagaaaactgccaacatcataggcgtggtgtttaccgagattaaaagcaataacgccaagcctgttttgtgggccatagagagtgagatccggtacagattccagctgtgatagcgcgtaatgcatcagattctgttcatactcggctatgttattaagcccctgcgccgaaacatactccagcgccgcgccaagaccaatgatgcccccggtattgggtgtaccggcttcaaaccgccacggtgctttggtccaggtagtgccttcactcaggctgacggtggcgatcatagaaccgcccccttcccacggcggcatctcctgtagcaaggcttctttgacataaagaatgccaatcccggtggggccatacagtttatgcccggaaaacacgtaaaaatcgcaatccagcgcctgaacatccaccggatgatgcatcaccgcctgagcgccatccaccagcacttttgcgccatgctggtgcgcaagcgtgatcatttccgccagtggattttctgtgccaagcacgttggagacatgagtaattgccagcaggcgagttttctcatcaaacagcgtaggcagcgtctccagttgcaacgtaccgtcgggattgagcgggatcacacgcagctctgcgccaacgcgtgcgcaaagcatctgccagggaacaatgttagcgtggtgctccatctgacttatgatgatgttatcgcccgcccgcacgttgctgttgccccagctattggcgaccagattgatcccttccgtcgtgccgcggacgaacaccagctcttccgccgaacgggcattaataaacagcgatgcccgcttgcgcacgttctccattttctcggtcgcctgggcgcttaaggtatgaataccgcgatgcaccgccgcgtagccatgacgataaaactcggcctcggcgtcaatcacctggctcggtttctgcgcactggcggcgctgtcgagataagccagcggcaaaccgtttacctcacgcgaaagcaccggaaagtcggcccgcactttgtcgacggaaaaagtcatcttgcacctcctggcagccgttgaccgattcgggtcagcacctgctgtttaagcccctcatcacgcagtgcttccgtcagttcggcagcaaaggcgtaaatgatcatctgctgggcatcctgctgattgatcccgcgcgagcgcagatagaacatctgttcatcatcaatacgccccaccgtcgcgccgtggctgcatttcacatcatctgcatagatttccagctgcggtttcgtatccacttccgccagtttgcccatcagcagattattgttggtcatctgaccatccgttttgatggcgtgctgcgcgacgttgatcaaaccgttaaataccgcgcggcctttgtcgctgacgatagttttgtgcaactgtcggctgttacaaaaacctttattgtgttccagccaggtacgggtatcacacacctcgtttttcaccggcatcgccaggctattgatccgcagcgtgcagttttcgccattgagttgcgtactggtgttgtgtcgtaacactgcgccacccagcaggaaactgtggctaaatgcggtggcatcgtcagccagcaacaaatcgttatgggcaaagtggtgactgagcgggttttcaaacgccagcttgatatgctgcaagtgggcattcgctgcgacgttgatagagaaccgtgccccggtaaaatgacgagcatcattaaggctgacaaaatgttcgatcaccgttgcttcggcaccttccgccagctccagatgatgtcggtaatgggcagtgttcaccacttcacctgccacgccctgggtgatatgcattaacagcaatggctttgccggccgttgaccgcgcttcacggcgatatgcgtcacgctttgtgccaggctttccgtcaaatgcagaaacacttccgcctgaatagcatcgggtaacccctgacggtcgtcgttaatgctcacttcatacccgctgccttcagtcgcatcgctcagcgcaggcacgtaacgtccatcgacaaataccagccgcacagcgtctaacgttaacgctaaggcatctcgctgctgtggggatatctctcccgcaatgctgacaaactgactattggtcagcccttccagcggcgtatatttccagttttcatgtttacgtgtcggcagtccggtacgcagcaattgttgtaaatgctgctgtgcttgcggggagcgttttgtcccttcagcttcaaacaagtgatgccactgttgcagcgcgttactgctgttcggtaagccagccataaccctgctcctccagttgtttgaccaacgtgaaatcgccggatttcacaattcgtccctgatatagcacatgaacgtaatcaggcttgatgtagtcgagaatgcgttggtagtgcgtaacaatgatgaatgagcgcttgccatcacgcagcgagttcacgccatcggcgaccacttttaatgcgtcgatatccagcccggagtccgattcatcaagaatgcataactccggttccagcaccgccatttgcaaaatatcgttgcgctttttctcgccgccggaaaaaccaacgtttaccgaacgggttaataaatcttccggcatcttcaggagagcgattttctcttccatcaaatcctgaaaatcaaagcggtcgagcgtttcctggccgcgatagctgcgcaccgcattaagtgccgtttgcaggaaaaactggttactgacacctggaatctccaccggatactggaaggccataaagatgccttcgcctgcacgatcttccggcgacagtgcaagcaaatctttgcctttgaactcaaccgtgccgcccgtcacttcataatcttctcgcccggcaagcgttgccgataaggtacttttgcccgaaccgtttggccccataatggcgtgaacttcgccgggacgaacgtcgaggcttaatccacgcaggatagctttatcttccacgctgacgtgtaaatctttaatacttaacatgtttattccttatccgacgctgtgttcaagactgatggcgaggagtttttgtgcttcaacggcaaattccagcggcagttctgagaacacgtctttgcagaaaccgttaacaatcatcgagatggcgtcttcttcgctgatcccgcgttgcaggcagtaaaacagttgatcttcaccaatacgtgatgtcgttgcctcgtgctccagttgtgcgctgttattgcgacattcgacatacgggaaggtatgcgccccacaattagcgccaatcagcattgagtcgcactgagtgaaattgcgcgcattggttgccgtcggcatgattttcactaagccgcgataactgttctggctatgtccggcagagatccctttcgagataatggtcgatttggtgtttttaccgatgtggatcatcttggtgccggtatccgcttgctgatgaccgctggtcagcgccactgagtaaaactcaccaatggagttatcgccgcgcaaaatgcagctgggatatttccacgtaatcgctgacccggtttctgattgcgtccatgacattttgctgttttcgccttcgcacaaagcacgcttggtgacgaagttgagaataccgccggtgttgttatcgccagggaaccagttttgtaccgtggaatatttcacctcggcgtttttatggatgatgacttccaccactgccgcgtgcaactgatagctgtcacgcaccggagcggaacagcnttcaatgtagctgacgtagctgtcttcgtcggccaccagaatggtgcgctcaaactgtccggttttttccgcgttaatgcgaaaataggtggaaagttccatcgggcagcgcacgcctttaggcacataaataaacgtaccgtcagaggctaccgccgcattaagcgcggcaaagaagttgtcattccccggcaccacggtgccgagatatttacgcaccagttccgggtgatcgtggatcgcctcaccaaaggaacagaaaataattccctgctccgccagtttttcgcgataagtagtggcaaccgaaactgagtcgaaaatggcatccaccgccacctctttgccttcccgcacgggaacacccaactgctcaaacgccgcctccacctctttacttaaaaaggcgttcgcgccagtttgctgcaccgcgccaggttcagacgcgcaagtgtcgtcacaattaccgcacgatggtgccgagtagtagctgtaatcctgataattcagcttgtcgtagtgcgctttcaaccagtgcggttcttccatctccagccatgcgcgataggcgtttagacgaaactccagcatccactccggctcattacgcttcgccgaaattgcgcgcaccacctcttcgtttatcccctttgccagctcatcggtggctaactgggtgaagaatccttctttataattcagcgggccgccggtccaggttttgacatcgtcagttgcttcagtattacgagacatagtaccgcctataccccaaagctttcgccacagccacattcattctgggctttagggttgtgaaatttgaatatctgattaagtccttcacgaacgaaatcgacttccgtgccatcaataaacggcatcgcttgcagcgggacaaacagcttcgcgccgtcgtgttcaaacagcagatcgtctttgtccggctcgctaacactgtcgagcacatagccaaagcccgcgcagcccgtttgcttcacacctaagcgcacgccgaccatacccggctgctttgccaccagctcgcggatgtggacagcggctgcgggtgtcagcgttaagccttgccaggcgaaatcctgtggattaaaggttcctgaatgcatgtccatcgatttacctcacttcatcgctttcagcgtataacagcatgttagtgataatgattatcagttcaacccagcaaacgcaggggctttaccgtaaaacatgctttttgcctgcttttaataagcatagaccctgatgtgtgggttaacaggcacgctaagaattaggtatctcattgttagataatgattattatctaaggagcattaaggctgtgatgaaaaagaaaaagttgtattgaaaatgactatttaagagataggtaaaaaagtgcagcgttcagaaataagaaaacccttaagtctgtgcgacacaggcttaagggtttctaccccatccggcgcttatctccggcactctcagtggcttagctcttgaaggggcgataagaataatntcataaagctaagccgccgttttaacacaaactgcgattagtattatttttgaacaatatcaggcgggtagataagcagtattaagaaggtcatcgaacctggacggaggttaatccaggtcgatttggcgaacttgcggcattaagtcaggatcaatgcacgcccagacgccaggcaaagtagatttcttcttttaattcagcagaagagagagtaagcaggtcagcaaattcaagttctagttgtttcagacgtttaagatattgggcaggtgaaagattgctctggtcacggcgtaaaaattcaatggccagctgggtgggatcaagttgagtagacatagcatcctcgcttttagacaagacctgcacagtataccaccgtttactgtgcagataatgaccaaaagcaatatgcgtcacacttttctggtgacaacgtcacaaaatggcggtcgtcaatcgtgacgaacagcacaaacgccctttctcatcggagatttcaatctgccagacctggtgacgcgaaccgagatgcaacggtttgcatacgccgcgcacccgcccttctcgtgccgagcggacgtggttagcattgatttccagaccaaccactttttgctcaccttcggtacataaataaccggcaacggaaccgatactttcggccagtaccacggatgcacctccatgtagcaacccgaaaggctgctttgtccgcgagtctactggcattgtcgcttcaagggtgtcatcaccaatatgttcaaagcgaatatccagtaaccccaccatgtttccttcacccatggcattcagtgcttccagggggatttttcgtttccatatcatttaataatctccagtaaagcctgcacaggatggcgtacccccgtgccttcaacccgtttgacctgactacggcaggaatatccggtcgccagacagcggttacgcggcagtcgctgcatagcctgatgccaggataactcatagatcccgagcgaatttttatggtttttcgcttcatgtccgtaagtccctgccatgccgcagcaacccacgctgacattttccagtttcgcgccaaaacgggcaaatatcgcggcccattgtgctggcgcacccggcaaggcggtaacttcggtacagtgaccaaagaaataccatgattcaccgctgactgtagccactggctgtgactcaagtgcgcttgccagccattcattcgccagtaagacgttaaactcgccacgctcctcgcccagcgccagtttatattcatcgcgataacaaagtaccagcgccggatcgacgcccaccattggcatacccagcttcgccatacggttgaggaaatccgcngtctttttcgccgtcttcgcaaaacgattaagaaaacctttaatatgctgggctttgccatttggcgaaaatggcagtaacacaggctggaaacctaatttttcgaccagacggacaaaatccgccaccacttgcgcatcgtaatagctggtaaaggggtcctgcaccaccaacactgtgcgcgctttctgctctgcattgagagattcaagctgttccagcgtcatgtttgccgagcgatgccccaccatttgttgttgtagcgaggggaccgacagcagcggcaaatcaaccatgccgatatgtttttccgagagtttgcgcaccagcggctggttaatgaagaagttaaaggttttcggcgcgcgtgnnnncagcggcgcgtagctctcgaccgtagcgacgaggtggtcgcgcagcgggcgtaaataacgggtgtgatagagctgcagaaaacgagagcgaaactccggcacatcaattttgatggggcactgggtcgaacaagctttacaggccagacagcccgacatcgcctctttgacttcgtgtgagaagtcatattcgcctttattcgcatgccagctattgcgcgtgcgggcaattaacgtccgcaagctgacgccggattcaggcagttcttgttccagtttgagtggatcaacgccgcgatccgccaacaaacgcagccattcacgcaccagcgttgcgcgccctttcggtgaatgaatccggttctgggtgatcttcatcgacggacacatcggactacgggcatcaaagttgaagcataaaccgttgccgttacactccatcgcaccgcgccactgctggcgtaccgcaatggggatctgccgatcgaatgtaccgcgcttcaccgcgtccactttcatcatcggcgcatcgagaccttctggcgggcaaatcttccctgggttgagtcggttatgcgggtcaaatgccgctttcactttgcgcagttctgcaaaaagttcctcaccgaaaaacgccgggctgtattcagcgcgaaaacctttgccgtgctcgccccacaacaaaccaccgtatttcgcagtcagcgccaccacgtcatcagagatttgcttcatcaaaatctcttgttgcggatcgcacatatccagtgccggacggacatgcaagacacctgcgtcgacgtgaccgaacataccgtagcttaagccgtggctgtcgagcagcgcgcgaaattcagcaatataatcggccagatgttccggcggtacgcaggtatcctcagcaaacggaattggcttagcggcacctttggcattgccaagcagaccaacggcttttttgcgcattgcatagatacgttcaacccccgccagctcacggcacatttgccagccgatgacacctgcttgatgactggcgatcagctcatccaaccgcgcacagagtgcatttacccgctcgtcaatcagcgcctcatcatcaccagcaaattccacaatgttcagcccgagcatctctttgtcaggcacatcggtaatcaactcgctgacggaatgccagacaatatcttcccgcgccagattcagcacttttgagtccaccgtctctaccgaaagcgcccgcgcctcaaccataaacggcgcgttacgcagcgcagagtcaaaagagtcatatttgacattcaccagacggcgcactttaggcaagcgcgtaatatccagccgcgcttcggtaataaaggccagcgtcccttctgaacccgtcagaatgcgcgtcaggtcgaactcggtcatctcatcgttaaagacatgacgcagatcgtaaccggtaagaaagcggttaagtttggggaagttgtcgatgattaactggcgttgctgacggcaacgttgataaaccgtgttataaattcgcccgattgtggtattggatttacccagcgtttccgccagctcgacgggtaaaggttgcgtatcgagaatatcgccccccaacaataccgcacgtaggccaagtacgtgatctgacgttttgccatagaccagcgatccctgaccggatgcatcggtattgatcatcccgccgagcgttgcccggttgctggtcgaaagttctggtgcaaaaaagtagccgaacggtttcaggtactgattgagttggtcttttatcaccccggcctcaacgcgcacccagccctcttcagggttaatttcgatgatgcggttcatatggcgggacatatcaacaataataccctggttgagcgcctgaccgttagtgccggtgccgccgccgcggggggtaaagatcagcgatgaatagcgttcctgcgcggcaagacgggcgatcagcgccacatctgcggttgaacgcggaaataccaccgcatcggggagaagttggtaaatactgttgtcggtcgacattgtcagacgatcagcataacttgtcgccgtatcgccggtaaaaccttgttgctccagctcttgcaaaaaattaagcaccagttgaacgacgccgggtgcctgggaaatctgtggaatcattatattgaccctttcctgcggtctgtgatgtaggtcgatacactgttctttcaggcggctgcaatagcgcacagaaaggtgatgtttatttactctatggatttcgagttgcaggaaggcggcaagcgagtgaactccaggagcttacaacagtaagtaactggggtgaacgaacgtagccgcagcatatgcaacttgaaatacgacgagtaaatcgtttgcgtgttgcctgagttgttgtaccacatttttttctaacacgcccatcagaattaagggcagaatcggcctgttaaaaaccgctgaaattgctcatcattatgcaggtgagtttcgcgtgttcacgtcgcgtcgacgatttgacgcacaaaaaaggtgaaaagtagttatggtaaatgttcgtcagcccagggatgtcgcacaaattctgctttcggtgctgtttttagccatcatgattgtggcatgtctgtggattgttcaaccctttattctcggctttgcatgggccggtacggtggttatcgccacctggccggtattgttacgtttgcaaaagatcatgtttggccgccgctctctcgccgttctggtgatgacgctgttattagtgatggtgtttatcatccctattgctttgctggttaacagtatcgtcgacggcagcggcccgctaattaaagccatttccagcggtgacatgacgttacccgatctggcgtggcttaataccattccggtgattggcgcgaagctgtatgcaggctggcacaacttgctggatatgggggggacggcgatcatggcgaaagtccgcccttatattggcaccaccactacctggttcgttgggcaagcggcgcatatcgggcgctttatggtgcattgtgcgctgatgcttctcttcagtgccctgctgtactggcgcggtgaacaggtggcacaaggcattcgccattttgcgacccgtctggcaggcgttcgtggagatgccgccgtactgctggcggcacaggctntncnnnnggtggcgctgggtgtggtggtgacggcgttagtacaggcagtgcttggcggtatcggcctcgccgtatccggcgtaccttatgcaactttgctaacggtgttaatgatcctttcctgccttgtccagcttggcccgttgccggtactgattccggcgattatctggctctactggactggcgataccacctggggaacggtattgttagtgtggagcggtgtggttggcacgctggataacgtcatccgcccaatgttaattcgcatgggtgccgatttaccgctgatcctgatcctctctggcgttattggtggtttgattgctttcgggatgatcggtctgtttattggtccggttctgttagccgtttcctggcgtctgtttgccgcgtgggtggaagaggtcccaccgccgacggatcaaccggaagaaattctcgaagaacttggcgaaatccagaaaccgaataagtaatttctcatcaggcggctctgccgcctgattgttaaccaccgctaattgatatttgcttgctcttccccatattttcctgcttaccgccattcagctggtagtacctgtcgcaaattctttacagtttttaaactaatgagacgaatctgatcgacgcaaaaagtccgtatgcctactattagctcacggttataaatcaacatattgatttataagcatggaaatcccctgagtgaaacaacgaattgctgtgtgtagtctttgcccatctcccacgatgggcttttttttaacatttttccgcttcgctacctcgcccctcactctttccaataatgttgcacaagatactgtgactctcttcaagccgtcagcaggctgataatgttatttatattttattgtttatttcatgcagccattacacgatgaacgcttatgaactccaggcactccgccatatttttgccatgactattgatgaatgcgcgacctggattgcccagaccggtgacagtgaaagctggcgtcaatgggaaaatggcaggtgtgccattcctgattgtgtagtcgagcaactgttggctatgcgtcagcaaagaaaaaaacatcttcatgcgatcatagagaaaataaataaccgcatcggcaacaacaccatgcgttttttccccgacttaaccgcgtttcaacaagtctaccctgatggcaattttattgactggaagatctatcaatcggtagccgctgaattatatgcacacgatctggagcggctttgttaatttctccacaaaaaggaattgtcgttgttacaacaataatgaacggatactgacacaacatcgctacactttttaaagcacctttgctaagtagaacctatgaaaaatccctattaccctaccgcacttgggttgtattttaattacctggtgcatggtatgggcgtcattttgatgagcctgaatatggcctcgctggagacactttggcagtctaatgccgcgggtgtctcgatagttatctcatcgctgggcattggtcgattaagtgtcttgctttttgcaggattattatccgatcgctttggtcgccgcccttttatcatgctcgggatgtgctgctatatggccttcttttttggcatcctgcagaccaataacatcattatcgcttatgtttttggctttctggcgggaatggcaaacagttttctcgatgcaggcacttatcccagtttgatggaagcttttccacgctcacctgggacagccaatattttaattaaagcatttgtttccagcggacaatttttattaccgctaatcattagcctgttagtgtgggctgaactgtggttcggttggtcctttatgattgctgcaggcattatgtttattaacgctctgtttttataccgttgtacgttcccaccccatccgggtcgtcgcttacctgtcataaagaaaaccaccagctctacggaacatcgctgttcaattatcgatttagccagttataccttatatggctatatctcaatggcaacgttttatctggttagccagtggctggcacagtacggacaatttgttgcaggcatgtcatacactatgtcgatcaaactactcagtatctacaccgtgggttcgctgctttgtgtatttattaccgctccactcattcgtaataccgttcgcccaacaacattactgatgctgtacacctttatctcatttattgctctgtttaccgtctgcctgcatcccacattttatgtggtgataatattttcttttgtcattggttttacttctgctggaggtgttgtgcaaattggcctgacgttaatggctgaacgtttcccttacgctaaaggtaaagctacagggatctattacagtgcgggcagtattgcgacctttactattccgttgattacggctcatctgtcccaaagaagtattgccgatattatgtggttcgatactgccatnnnngccatcggttttttactggcactgtttatcggcttacgcagccgcaaaaaaacgcggcatcactcgctaaaggaaaatgtcgctccgggtgggtaatgcaatattcttttcaggtcatgcaagatcttacggataaataactctttctgcgctaactaaggaaaatcgcgatcaaaaacaaactatgacatgcaatattcctggaaacataaactttatgccatgtacccagggaaaatcatcttcagtatagtaattatgtaaaccgtcggagaacaatacgtacggtaacgaaattatctttcagcaaggagctgtgaaaatgtctcaaaataaggctttcagcacgccatttatcctggctgttctttgtatttacttcagctacttcctgcacggcattagtgttattacgcttgcccaaaatatgtcatctctggcggaaaagttttccactgacaacgcgggcattgcctacttaatttccggtatcggtttggggcgattgatcagtattttattcttcggtgtgatctccgataagtttggtcgtcgggcggtgatattaatggcagtaataatgtatctgctattcttctttggtattcccgcttgcccgaatttaactctcgcctacggtctggcagtgtgcgtaggtatcgctaactcagcgctggatacgggtggctaccccgcgctcatggaatgctttccgaaagcctctggttcggcggtcatactggttaaagcgatggtgtcatttgggcaaatgttctacccaatgctggtgagctatatgttgctcaataatatctggtacggctatgggctgattattccgggtattctgtttgtactgatcacgctgatgctgttgaaaagcaaattccccagccagttggtggacgccagcgtagctaatgaattaccgcaaatgaacagcaaaccgttagtctggctggaaggtgtttcatcggtactgttcggtgtagccgcattctcgaccttttatgtgattgtggtgtggatgcccaaatatgcgatggcttttgctggtatgtcagaagctgaggcattaaaaaccatctcttattacagtatgggctcgttggtctgtgtctttatttttgccgcactactgaaaaaaatggtccggcccatctgggctaatgtatttaactctgcactggcaacaataacagcagccattatctacctgtacccttctccactggtgtgtaatgccggcgcctttgttatcggtttctcagcagctggcggcattttacagctcggtgtttcggtcatgtcagagtttttcccaaaaagcaaagccaaagtcaccagtatttatatgatgatgggtggactggctaactttgttattccgctgattaccggttatctgtcgaacatcggcctgcaatatatcattgttctcgattttactttcgcgctgctggccctgattaccgcaattattgtttttatccgctattaccgcgtttttattattcctgagaatgatgtgcggtttggcgagcgcaaatttagcacccggttaaacacaattaagcatagaggttaaaggagttaattatggatgttaccgcaaaatacgaattgattgggttgatggcttatcctatccgccacagtttatcgcctgaaatgcagaataaagccttagaaaaagcgggattgccatttacctatatggccttcgaagtggataacgatagctttcccggagcaattgaaggattaaaagctctaaaaatgcgcggaactggtgtatcaatgccgaacaaacaactggcgtgtgaatatgttgatgaattaacgccagcagccaaactggtgggtgccatcaacaccatcgttaatgatgatggctacctgcgcggctataacaccgacggcacgggccatattcgcgccattaaagagagcggttttgatatcaaaggcaaaacaatggtgctgttaggggccggaggtgcctcaacggcgattggcgcgcagggggcaattgaaggtttaaaagaaattaaactctttaaccgtcgggataagttcttcgataaagccctcgccttcgcgcagcgggttaacgaaaacaccgattgtgtcgtcacggttaccgatctcgccgatcagcaagcctttgctgaagccctggcttccgccgacattttaaccaatggcacaaaagtgggtatgaaaccccttgagaataaatcattggttaatgatatcagtctgttacatccgggactgctggtcactgaatgcgtgtataacccgcatatgacgaagttattgcagcaggcgcaacaagctggttgcaaaacgattgatggatacggcatgttgttgtggcaaggggctgaacagttcacgttatggactggcaaagatttccctctggaatatgttaaacaggtcatggggttcggtgcctgacaggctgaccgcgtgcagaaagggtaaaaaatgaaaaccgtaactgtaaaagatctcgtcattggtacgggcgcacctaaaatcatcgtctcgctgatggcgaaagatatcgcccgagtgaaatccgaagctctcgcctatcgtgaagcggactttgatattctggaatggcgtgtggaccactttgccgacctctccaatgtggagtctgtcatggcggcggcaaaaattctccgtgaaaccatgccagaaaaaccgctgctgtttaccttccgcagtgccaaagaaggcggcgagcaggcgatttccaccgaggcttatattgctctcaatcgtgcagccatcgacagcggcctggttgatatgatcgatctggagttatttaccggcgatgatcaggttaaagaaaccgtcgcctacgcccacgcgcatgatgtgaaagttgtcatgtccaaccatganttccataaaacgccggaagccgaagaaatcattgcccgtctgcgcaaaatgcagtccttcgacgccgatattcctaagattgcgctgatgccgcaaagtaccagcgatgtgctggcgttgcttgccgcgaccctggagatgcaggagcagtatgccgatcgtccaatcatcacgatgtcaatggcaaaaactggcgtaatttctcgtctggctggtgaagtatttggctcggcggcaacttttggtgcggtaaaaaaagcctctgcgccagggcaaatctcggtaaatgatttgcgcacagtattaactattttacatcaggcataagcaataatatttcggcgggaatatcctcccccgccgaactaaaaaaatatattcaaccgtatttaataaaaatatttcgtgagtctctgtgcgctaattatccatctggcgtagggaaaatcacacctgaatcaggaattaacaatgaaacctgtaaaaccacctcgtattaatggacgagtgccggtcctgtcggcacaggaagcggtgaattatattcccgacgaagcaacactttgtgtgttaggcgctggcggcggtattctggaagccaccacgttaattactgctcttgctgataaatataaacagactcaaacgccacgtaatttatcgattattagtccaacagggcttggcgatcgcgccgaccgcggtattagtccgctggcgcaagaaggtctggtgaaatgggcattatgcggtcactggggacaatcgccgcgtatttctgatctcgcagaacaaaataaaattattgcttataactatccacaaggtgtacttacacaaaccttacgcgccgccgcagcccaccagcctggtattattagtgatattggcatcgggacatttgtcgatccacgccagcaaggcggcaaactgaatgaagtcactaaagaagacctgattaaactggtcgagtttgataacaaagaatatctctattacaaagcgattgcgccagatattgctttcattcgcgctaccacctgcgacagtgaaggctacgccacttttgaagatgaggtgatgtatctcgacgcattggttattgcccaggcggtgcacaataacggcggtattgtgatgatgcaggtgcagaaaatggttaagaaagccacactgcatcctaaatctgtccgtattccgggttatctggtggatattgtggtggtcgatccggatcaaagccaactatatggcggtgcgccggttaaccgctttatttctggtgacttcacccttgatgacagcaccaaacttagcctgcccctaaaccaacgtaaattagttgcacggcgtgcattattcgaaatgcgtaaaggcgcggtggggaatgtcggcgtcggtattgctgacggcattggcctggtcgcccgggaagaaggttgtgctgatgactttattctgacggtagaaacaggtccgattggtggaattacttcacagggtatcacctttggcgcgaacgtgaatacccgtgccattctggatatgacgtcccagtttgatttttatcacggtggtggtctggatgtttgttatttgagttttgctgaagtcgaccagcacggtaacgtcggcgtgcataaattcaatggcaaaatcatgggtaccggtggatttattgatatcagtgccacctcgaagaaaattnttttctgcggcacgttaactgcgggcagtttaaaaacagaaattgccgatggcaaattgaatatcgtccaggaaggacggatgaagaaatttattcgggaactaccggaaattacttttagcggaaaaatcgctctcgagcgagggctggatgttcgttatatcactgagcgcgccgtattcacgctgaaagaagacggactgcatttaatcgaaatcgcccctggcgtcgatttacaaaaagatattctcgacaaaatggatttcaccccagtgatttcgccagaactcaaactgatggacgaaagattatttatcgatgcggcgatgggttttgtcctgcctgaagcggctcattaacaggagtatcacgatggatttttctttaactgaagaacaagaactgctgctggccagtattcgcgaactgattacgactaactttccggaagagtatttccgcacctgcgatcaaaacgggacatatccgcgtgagtttatgcgggcactggcggataacggtatttccatgcttggcgtgccggaagaatttggtggtatccctgctgattacgtcacccaaatgctggcgctgatggaagtgtcaaaatgcggtgctccggcatttttaattaccaacggtcaatgtattcacagtatgcgccgtttcggttctgcagagcagctacgtaaaacggcagaaagcaccctggaaacgggtgatcccgcctatgccctggcgttgacggaaccaggtgctggctcagataacaacagtgccactaccacttacacgcgtaaaaacggcaaggtttacatcaacggacagaaaacctttattaccggtgcgaaagagtacccgtatatgctggtgctggcgcgcgatccgcaaccgaaagatcccaaaaaagccttcaccctgtggtgggtcgactccagtaagcccggcattaagattaacccgctgcataaaatcggctggcatatgctcagcacctgcgaagtctatctcgacaacgtggaagttgaagagagcgacatggtgggcgaagaaggaatgggtttcctcaatgtgatgtacaactttgagatggagcgcctgatcaacgccgcgcgcagcaccggctttgccgagtgtgcctttgaagatgccgctcgctatgccaaccagcgtatcgcttttggtaaacccattggtcataaccagatgatccaggaaaaactggcgctgatggcgattaagattgacaacatgcgcaacatggtgctgaaagtggcatggcaagccgatcagcatcaatcactgcncaccagcgcggcgctggcaaaactgtactgtgcacgtaccgcaatggaagtcattgatgatgcgattcaaatcatgggcggtctgggctataccgatgaggcnnnngtctcccgcttctggcgtgatgtccgttgtgaacgtattggcggcggtacagacgaaattatgatttacgtagcaggtcggcagatcctgaaagactatcagaacaaataatctgcaggcggcgcagcttcttaacaaactgcgccgccagatttatccggcaagacttaccggttgaggaaattcagataggatttcttgttccgcaaaacagtttttaaattgcctgcggtaatcgctgggcgaacagccgacatggcgcaaaaacagtttggcaaagtgatcgacattttcataacccacacgccaggagatctctgcctgtgataattcagtattagtgagtgaccattttgcttccgtcatacgccgttgaataacatagttaataggggaaatacgatactctttggtaaattcatggcaaatataactgacgctggcacgaaattttttcgataactgttctaaagtgattttttnnnnnnnnntattattcagatagaaaagaatatcttttatcagaacatcttttttaatatacccctgctccgaacgataagcatttttaaagttttcgtagtaaagaattgctaatgtataggcaaatgcatcccataacgaagatgtttggctatttttactttgcggcaaaatcacacttagctcattaaataaggttttaatgacttcttttccctgccccgcggcaattaccggacaagaatgcggttgcagtagatgattttcctcagccccctgaaactgaaagccgtacagcgcacaagtacacgtcgttgccggatcgttaacgtcagaggccaccgcatgcagcctgccgcgttctatcaccactatatcatctgcatgcgcgacatataacgaagaatcgatggtaaaccttgccacccctttcttgacgtaaatcagctcggtttcattgtcatgaacgtgatgtccagactcccattttggatcatcgctaaatgcaaaacgtgaaagccgtggcgttttaccagcgacaaacagcgtttcactggcattatcaaaacagcgttgatacatgacaacctccctattccatgagcaagcaaaaacaatatatgccggataaaatacggcgtgtattgcggttatacaaccgcgtttagcgagagctaaacaagattatttacactgaatgcaagattgtacggtcatggaataactatattgccgcaaattgcacttttgttttanngatcgcnttttttttgcaagattgttggcaaggaaaacagcttgctccgtcgaaaaccccgcaccgctatcgcacactattttcaggccatttttaccttccatcggagatggttccgtatgcgactcacaggagaaatcatgaaaataataacctgctttaagctggtgcctgaagaacaggacattgttgtcactccagaatacaccctgaatttcgacaatgccgacgccaaaatcagccagttcgatctcaatgccattgaagctgcaagccagcttgcaacagatgacgatgagatagccgcgctgaccgttggcggctcattgttgcagaactcgaaagtgcgcaaagacgtgctatcccgcgggccgcacagcctgtacatggtgcaggatgcacaacttgagcatgcactgcctctcgataccgcaaaagcgctggcggcagcagttgaaaagatcggcttcgatttactgatctttggtaaaggttccggcgacctttatgcccagcaggttggcttgctggtcggagaaattctgcaacttccggtgattaatgcagtgagtgctattcagcgtcagggcaatacactggtgattgaacgcacgcttgaagatgacgttgaagttattgaactctctgttccagccgtgctctgcgtcacctccgatattaacgtgccacgcattccttcgatgaaagccattctcggcgcgggtaaaaaaccggtaaatcagtggcaggcaagtgatattggctggagccagagcgcaccacttgctgaactgaccggcattcgcgtaccgccgcaaacagaacgtaagcacatcattctcgataacgattcgccggaggccattgccgagctggcggaacatctgaagaaagccctgaactgaagcctacggagaagaaacgatgagtcaattaaacagcgtctgggtctttagcgataatcctgaacgttatgctgaactgtttggcggcgctcagcaatggggccaacaggtgtatgccattgtacaaaataccgaccaggcgcaggcagttatgccttatggtccaaaatgtatttatgttcttgagcaaaacgacgcgctgcaacgcactgaaaattacgccgaaagcattgctgctctgctgaaagataaacaccccgctatgttgctactggccgcgacgaaacgtggtaaagcgctggcagcacggttaagtgtgcaactgaatgcggcgctggtgaacgatgccacggcggtggatattgtcgatggtcacatttgcgccgaacaccggatgtatggcgggttagcgttcgctcaggaaaagatcaacagctcgctggcgatcattacccttgcacccggtgttcaggaaccgtgcaccagtgatacctctcatcagtgcccgacagaaacggtaccttacgttgctccgcgtcatgaaattctctgtcgcgaacgccgtgcgaaagccgcaagcagcgtggacctgagcaaaacaaaacgtgtggttggcgtcggtcgtggtctggcagcgcaggatgacctgaaaatggtccacgaactggcggcggtgctgaatgctgaagtcggctgttcacgtccaattgccgaaggcgagaactggatggagcgtgaacgttatatcggtgtctccggcgtgttgctgaaatccgatctctacctgacgctagggatctccgggcagatccagcatatggttggcggcaacggcgcaaaagtgattgtcgccatcaataaagataaaaatgcgccaatcttcaactatgccgactacggtctggtgggcgatatctacaaagtcgtccctgccctgattagccagttgagccgctaattcccctttcaaccacatctcccgctgtaaacgcagcgggaagggagcataacgcatgtcggatgacaaatttgatgccattgtggtcggtgcgggcgttgctggtagcgttgccgcactggtcatggcgcgagccgggctggatatcctggtgatagaacgcggcgacagtgccggatgtaaaaacatgaccggcgggcgtctttatgcccacacacttgaagcaatcattccaggctttgcagcatcagcgccggtagaacgcaaggtcacacgcgagaaaatctccttcttaaccgaagagagcgccgttaccctcgattttcaccgcgagcaaccagatgttccgcaacacgcatcttataccgtattgcgtaatcgtctggacccgtggttgatggaacaagccgagcaggcgggcgcacagtttatcccgggagttcgcgtcgatgcgttggttcgtgaaggaaacaaggtcactggagtccaggccggggatgatattctcgaagccaatgtggtgattttagccgatggcgttaactcgatgcttggccgctcgctgggaatggttcccgcttccgatccgcatcattacgctgttggtgttaaagaggttattggcctcacaccagaacagatcaacgatcgctttaatattacgggcgaggaaggtgccgcctggctgtttgccggttccccttctgacggcctgatgggcgggggatttctctataccaacaaggattccatatccttggggctggtttgtggattggctgatatcgcccatgcgcaaaaaagcgtgccgcaaatgctggaagattttaaacaacaccccgccattcgcccgctgattagcggcggcaaactgcttgaatattccgcgcatatggtgccagaaggcggtctggcgatggtaccgcaactggttaacgatggcgtgatgatcgttggtgacgccgcaggcttctgcctgaatttgggttttacggtccgcggcatggatttagccattgcatcggctcaggctgccgccacaacagtgatcgccgccaaagaacgcgcggatttctccgccagcagtctggcgcaatacaaacgtgagctggaacaaagctgcgtcatgcgtgatatgcagcattttcgcaagatcccggcgctgatggaaaacccgcgcctgtttagccaatacccacgaatggtagccgacatcatgaacgagatgttcaccattgacggtaagcctaaccagccggtacgcaaaatgatcatgggacacgcgaagaaaattgggctgatcaacttgctgaaagatggcattaagggagcaaccgcgctatgagccagaacgctacggttaacgtcgacatcaaattaggcgtcaataaattccatgttgatgagggccacccgcatatcattttggcggcaaatcccgatatcaatgaattccgtaaattaatgaaagcctgccctgccggactttataagcaggatgacgcaggaaacattcattttgattccgccggttgtctggagtgcggcacctgtcgggtgctgtgcggtaacactattctcgaacagtggcaatatcccgcaggcaccttcggtattgattttcgctacggctaatcatgcatcccacaggcccgcatctcgggcctgatgttctgtttcgagagtccaaaatgaaagtgacattaacgtttaacgaacaacgtcgtgcggcgtatcgtcagcaagggctatggggcgatgcttcgctggccgattactggcagcagaccgctcgtgcgatgccagacaaaattgccgtggtcgataatcatggagcatcgtacacctatagcgcgctcgatcacgccgcgagctgtctggcaaactggatgttagcgaagggtattgagtcaggcgatcgcatcgcatttcaactgccaggctggtgtgaatttaccgttatctatcttgcctgcctgaaaatcggtgcggtttccgtaccgctgttgccttcctggcgggaagcagaactggtatgggtgcttaataagtgtcaggcaaaaatgttctttacaccgacgttgtttaaacaaacgcgtccggtagatttaatcctgccgctgcaaaatcagcttccacaactacaacaaattgtcggcgtggacaaactggctcccgccacctcttccctctcattaagtcagattatcgccgacaataccccactgaccacggcgataacgacccacggcgatgaattagctgcggtgctgtttacctccggaaccgagggtctgccaaagggcgtgatgcttacgcataacaatattctcgccagtgagcgggcttattgcgcgcggctgaatctaacctggcaggatgtctttatgatgcctgcgccacttggtcacgcaacgggctttctgcatggcgtaacggcaccattcttaattggcgctcgcagcgtgttgttagatattttcactcctgatgcgtgtctcgcgctgcttgagcagcagcgttgctcctgtatgctcggcgcaacgccgtttgtctatgatcttttgaatttactagagaaacaacccgcagacctttcagcgctgcgcttctttctttgcggcggtaccacaatccccaaaaaagtggcgcgtgaatgccagcagcgcggcattaaattattaagtgtttatggttccacagaaagttcgccncatgcggtggtgaatctcgatgatcctttgtcgcgctttatgcacaccgatggttacgctgccgcaggtgtagagattaaagtggtcgatgacgcacgcaagaccttaccgccaggttgcgaaggtgaagaagcctcgcgtggccccaatgtgtttatgggatattttgatgaacctgaattaaccgcccgtgccctggatgaagaaggctggtattacagcggcgatctctgccgtatggatgaggctggctatataaaaattaccggacgcaaaaaagatattattgtccgcggcggcgaaaatattagcagccgtgaagtggaagatattttattgcagcatcctaaaattcacgatgcctgtgtggttgcaatgcccgatgaacgtttaggtgaacgatcatgcgcttatgtcgtgctgaaagcgccgcatcattcattatcgctggaagaggtggtggctttttttagccgtaaacgggtcgcaaaatataaatatcctgaacatatcgtggtaatcgaaaaactaccgcgcactgcctcaggtaaaatacaaaagtttttgttacggaaagatattatgcggcgattaacgcaggatgtctgtgaagagattgaataagtttcatcttcggggatcacataaacccggcgacaaaacgccgccggggatttattttatttcttcagttcagccaggcttaaccaggtttgcaccacggtgtccgggttcagagacaggctatcgatcccctcttccatcaaccatacggcaaagtcttcgtggtcggacggaccctgaccgcaaatcccgacatatttgccctgtttcttcgcggcacgaatcgccatcgacagcagtgctttcaccgcatcgttgcgctcatcgaacagttcagacaccacgccggagtcacgatccagaccgagcgccagctgcgtcatgtcgtttgagccaattgagaagccgtcgaaatattcgaggaactgctcggccagcaaggcgttggacgggatttcacacatcatgatgattttcagcccgttctcaccacgcttcagcccctgacgcgccagttcctcaaccaccgctttcgcctgatctacggtacgcacgaacgggatcatgatctcaacgttggtcagccccatgtcgttgcgcacacgtttcactgcttcacactccagcgcgaaacagtcgcggaagctgtcggaaacatagcgtcccgcgccacggaagccgagcatcgggttctcttcatctggctcataacgctcaccaccgaccaggttggcatattcgttcgatttaaaatcagagagacggacaatgacgcgcttcggataaaacgcggcacccagcgtcgcgatcccttcagtcagacgaccaacgtaaaattcacgcggagaatcaaaacctttcatcatctcgcggatttcgttttgcaactgcggttcctgatcgtcaaactcaagcagtgcgcgtgggtggacgccaatcatacggttgatgataaattccagacgtgcaaggcccacgccttcgttcggcaggcaggcgaagtcgaaagcacggtccgggttaccgacgttcatcatcactttcaacggcagatccggcatcgtttctacgctggagcttttcacgctaaattccagcaactccgcatagacgtaaccggtatcaccttcggcacaagaaacagtgacgttctcaccgtctttcatccgttctgttgcatcaccacagcccactaccgccggaatgcccagttcacgagcgatgatcgccgcgtgacaggtacgaccgccacggttggtgacgatggcagatgctttcttcatgatcggttcccagtccgggtcggtcatgtcagtgaccagcacgtcaccaggttcgatgcggttcatttcgctgatatcatggatgactttcaccggacccgcaccgatgcgatgaccgatagcacggccttcggcgataatcttaccctgtgaatgcagcgtataacgctccatgacctgaccgcgtgagcgcacggtttccggacgcgcctgcacaatgaacagtttaccagtgtggccatctttcgcccactcaatatccatcgggcgaccgtagtgtttctcaatttgtacggcctgttttgccagttcctgcacttcttcgttggtcagcgagaagatgtcacgctgttcctgcggtacgtcttcgattttaacctgcttgccgtgctcctgggtcggcgcgtaaaccatgcggatttttttcgaccccatggtgcggngcacgatagccgggcgattcgccgccagtgtcggtttatgcacgtaaaactcatccgggttaaccgcaccctgcacgaccatctcaccaaggccccatgcggaagtgataaacaccacctggtcaaagccggattcggtatcaatggagaacatcacgccagaagatgcgaggtcagagcgcaccatccgttgaacaccggcggagagcgccacaccacggtgatcgtaaccctggtgcacacgataagagatggcgcgatcgttaaacagagaagcaaatacatgtttcactgccacgagaacggcgtcaaaaccctgaacgttgaggaaggtttcctgctgaccggcaaaagaagcgtccggcatatcttctgcggtggcggaggagcgcaccgcaaaagaggcgttttcgtcatcggcggaaagctgtgcataggcttcgcggatggcgttttccagctcaggctggaagggagtgtcgataatccactggcggatttgcgcgcccgctttcgcaagctgagtaacatcgtcaatatccgttttatccagcagttcataaatgcgctggtttacgccgctttggtccagaaactggttaaacgcgtcggcggttgtggcgaaaccattcggaacggaaacacccattccggaaaggttagtaatcatttcacccagggaggcatttttgcccccaaccctgtctacatcattcatgccgagttggttataccaaagcaccagcggtgacgagccattgttggacatcgaacaatccttttgtgataaatgaacggtttgagaaacacatttctgcgcatttatctttgcatatttaaccggatgaaaaaaacggtgaatcgttcaagcaaatatatttttttactttttaagactgatcccagcgttgcgcaaatctgctcttttcgacaatttccacataaaccatcggtataaacgaaaccataaaaatgaaatgctgttttcataaaaaataaaattgaaggttcattttataaaccagacataacgttctacgcttctgtgcgtttttaatttatgctttcatagaattatgtctgcatcacgggaagaacaaaatggataatgctgttgatcgccacgttttttatatttctgatggtacggcaataactgcggaggtattaggacacgcagtaatgtcacaatttcccgtcactatcagcagcatcacgctgccgtttgtcgaaaatgagagccgtgcacgggcagtgaaggatcagattgacgcaatttatcaccagacaggcgtgcgtccgctggtcttctactccatcgtgttgccggaaattcgcgccatcatcttgcaaagtgaaggtttttgccaggatatcgttcaggcgctggttgccccgctacaacaagagatgaaactggatccaacgccgattgctcatcgtacccatggccttaaccctaataatctcaataaatatgatgcgngnnttgcggcgattgattacaccctcgcccacgatgacggcatttcgttgcgcaatctggatcaggctcaggtgatcctgctcggtgtttctcgctgtggtaaaacccccaccagtctgtatctggcaatgcaatttggtatccgcgcggcaaactacccctttattgccgacgatatggataatctggtgctacccgcgtcgctcaaaccgcttcagcataaattgttcggcctgactatcgacccggaacgtctggcggcgattcgcgaggaacgtcgggagaacagtcgctatgcctcgcttcgtcagtgcaggatggaagtcgcggaagtggaagccttgtaccgtaaaaatcagatcccgtggattaacagtaccaattattcggtagaagagattgccaccaagatcctcgatatcatgggccttagtcgccgaatgtactagagaactagtgcattagcttatttttttgttatcatgctaaccacccggcgaggtgtgacacacctcgcacttgaaatcagcagcgattggtttatcgtgatgcgcatcacttcccggcagtcctgccgtagaagcaacaaatttctgagacttgtaatgaacagaactgacgaactccgtactgcgcgtattgagagcctggtaacgcccgccgaactcgcgctacggtatcccgtaacgcctggcgtcgccacccatgtcaccgactcccgccgcagaattgaaaaaatactcaatggtgaagataagcgactgttggtcattattggcccctgctcgatccacgatctcaccgctgcaatggagtacgccacccgtctgcagtcgctgcgcaaccagtaccagtcacggctggaaatcgtaatgcgcacctattttgaaaaaccacgaactgttgtcggctggaaaggactaatctccgatccagatttaaacggcagctatcgggtaaatcacggtctggagctggcgcgcaaattacttttacaggtaaatgagctgggcgtcccaaccgcgactgagttcctcgatatggtgaccggtcagtttattgctgatttaatcagttggggcgcgattggcgcacgtactaccgaaagtcagatccaccgtgaaatggcttcggcactctcctgtccggtaggttttaaaaatggtaccgatggcaatacgcggattgctgtggatgctatccgcgcagcccgcgccagccatatgttcctctcgccagacaaaaatggtcagatgaccatctatcagaccagcggcaacccgtatggccacattattatgcgtggcggcaaaaaaccgaattatcatgccgatgatatcgccgcagcctgcgatacgctgcacgagtttgatttacctgaacatctggtggtggatttcagccacggtaactgccagaagcagcaccgtcgccagttagaagtttgtgaggatatttgtcagcaaatccgcaatggctctacggcgattgctggaattatggcggaaagtttcctgcgcgaaggaacgcaaaaaatcgtcggcggtcagccgctcacttacggtcaatccattaccgacccgtgtctgggctgggaagataccgaacgcctggtcgaaaaactagcctctgcggtagatacccgcttctgaatgcgtgcccattcctgatgggatgggcatttctgcgcaacttgttgtcttctcaacacattactgcttgctctggtcagccataatattgataataagaatcattgttatatcaattattattaatttttatgcgttatacggatagcagaaaactcacgcctgaaacggatgccaatcacaagaccgcttccccgcagcctattcggcgaatttccagccagacactgttaggtccggatggcaaactgattatcgatcatgacgggcaagaatatctgctccgtaaaactcaggctggcaagctgctgttgaccaagtagcctttaactcgagcagctgacttccagccgtttaccccagtcaggtggacgactgacatagtcatcatctctgtcgctgaaaggatttcgcaacgcctcatgcaggcggtgcaattccgtcatatcacccttttctgccgcttcaatcgcccgttgcgccaaccagttgcgcaataccagagcggggttaacgctttgcatcagttgctgacgctcactatcgctaacctcgtcttgttgcaaacgccctcgataacgggcaaaccagtcatcaaatgccgcacgatcaataaactcatcacgtagcggtgacgccgcgctgtgctgctcggtcagactcagcatgcgaaatgtgcgggtataatcgctgcgctctcgcgccatcagactgaataattcattcagtagcgcgttatcctctttttgctccgtcataaagcccagtttctgccgcatccgttgtccataatgcgtcaacaaaacctgctgatagctgtccagggcctcattcagggcatctacggcaacaaatggtgacaatgtctgcgccagacgctgtaaattccacaacgcgacagcaggttgattgtcaaagctgtaacgtccttgatgatccgagtgattacaaataaaaccgggttcgtaatcattaagaaaaccaaacggcccgtaatcaagcgtcagtcccagcagcgacatgttgtcggtattcatcaccccatgtgcaaagccgaccgtctgccattgggcaattaacgatgcggtacgtgcgacaacatcgttaaaccagagacggtatttgtcctcatcatcttcaagatgtgaccagtaatgacgaatggcaaagtcagccaactgacgaaccttatccggctcgcggcgatagtaaaaatgttcgaaatgaccaaagcgcagatgacttggtgccacacgcatcagcatcgcgcctggctccaccgtttcccgatacactggcgaatcgctggtgacgatacttaacgcgcgggtcgtcggaatgcccagataatgcatcgcctcactggcgagactttctcgtatcgtcgaacgtaataccgcccgtccatcacccattcgcgaataaggcgtcaggccagcacctttcagatgccagtccattgtagtgccatcagcaagcagttgttcgccaagtaaaatgccgcgcccatcacccagttggcccgcccagacgccgaactgatgaccactgtaaacctgcgccagtggtgacataccaggcagtagggtttcgccgccccagacacctgcnccatttttaaacagcgacgatggaatactcagcgtgttagcgagttcggtattatgccaaatcagccgggcattatttaaaggcgtaggggaaagtgctgtataggtttctggcaattcatcgcgccagcgggtaataaaagacagggtcatagagcctcctgtttgatagtgtagacggttactctcgtcttaaacaccagcaaacaggagggttatcgctgaaccaacgtcgttatctgatttatgggaacggcaggccacaggcatccctggagagcatggaaatcgaagggggtaatctgtgctaatatttctggcgtatcaatgccccccgcgatgatgcaattgcaacaaggggaaatttgcgcctgaatcgcacgaataaacggttcgaaggagcgatgcgtgatttgttgctgaataaaacttttatccagcattacgcgggtgaaaagaccatcaaaaaccgctttcattgtgctattgcctgctcccaaattacctaacacaaggggatacacttgcgataaggataaaagaccgcgattatcttttccttcattgagatgcgggtaattctcattaatcaacagttcaataaacggatattttaatagttcgcctgcgtaattatccctctctaataataatgtagccacttgtggcgttaaattaagccaggcaaagagtttatgttgaataaaaaaatgttggcatgattttagtaattccaactgctntgaaaataattgccaatgttgctcctcggtaagttgcgctataacccgactcgtcgggatacgcaccgtgccatcttcactggagaaatgggtaattaactcaacgccgacaaggacttgctggttatctcttatcggcaggaaatagcaatcagaatgataaagattctccaaaaaaatcttcatggtaaccgtccctctcgaaggatgtttttcagtatccggctaaaagggatgaggccataagacataacaattacagaaggagtaactttcatttgttccatgttaaccactttttcaggggtcctttttttagattatcctgattataaacgaataatccatttacggaatttttgtctgcaaaatactactgtattctggagtaaatggacggcgatgtatcatcgacgtccaattttcgacatactagattcgtctcgcctgccagaaatttttctgccaatagacattatcaagtgaggaacgcatcactcccttgctggtagaggcgtggataaattggttgttggtatcgtaaatacctacatgcaaaccattttgtccggaacccgttttgaaaaagaccaggtcaccaggcagcaactcgtctttatcaatttgcgtgccgatagaggcttgttctttggtttctcggggcagctgcaaatcgaaacgatcgcgcatcgtcacaaccacaaatcccgaacagtccacaccgcgccgcgtcatgccaccataacgatacggcgtgccatgccagctttgtagctggtcgttcaaaccggcaataacggtaatcgaatcagaaagtctggcatttggcggcggtgctttatggtggctacacccggccagaaacagtgctgtgatcaaaataaggcagaaacgcattccgtacggttcctctgttttttattcttgcattaatttagcgtcgtaattacccgattttcaagatactaatgaaatcagatggtcgaaatcagcattctgtgaccttcgatatccagacggcgaaaattcatcccataggcctgcgccagatttggcggcgtgagcacatcttctctgcgtccactggccagcatttttccaccttttagcaaccacgcccgatgcgcatgacgcaatgtgtggttgagatcgtgactgctcatcacaatcgccagtccttgctgacacagcgcgctcagaattttgtctaacgcactttgttgcgcaacatcaagactgttcatcggctcatcaagaagcagcaattggcctgcgggattggcttgtggtgtgatttgcagcaccaccgcagcaagacgtacgcgttgccattcaccgccggaaagttgattggtgctacgaccgagtttgtcatcaagagccagcgcccctgcgacatcattcagtagttcggtacgcgttttatcgtgctgatgcagtgtcaggtagtgccagaccggcattgcaaacggcggcgtctgctgttgtgaaagataggcacgatgcagcgcgagttttgttgcggaccatgcttccagtggttgccccgcgaactgaatgcttcccttaccgctggtcattccggccattcgcgccagtaaggtactcttacccgcgccattcggccccaccaggtgcaggatctccccagcccgaacctcgccagaaagcggccccaggcgggtagattccgcaacatcctgtaactgcatcacaatagacattattttgccaacgccagtttaatgctttccatcacaatgggatcttccggcgtcatatccggggaaaaacgctggatgaccaatccgtccctgccaactaaaaatttctcaaaattccataaaatatcatcagggtacagcggtgcacgacctttgctgaccatacgggcatagaatccgctctcttccggcgcgactgcggtcggcgctgcggaaatcaatttttgatacagcggatggcgtccttcgccattaacttcaatcttactgaacatcgggaacgtcaccccccatgtggtggtacagtaagttttaatctcttcatcgctgcccggttcttgttccagaaactggttgcacgggaatcccagcaccacaaaacctcgatcggcccaggctttctgaatattctccaactgctcatattgcggcgttaagccacactttgaggcgacattgacaatcaacagcacattaccggcgtacttctccagcgtggtcacttcaccgtcgatatctttcactacggtcgtcagaatggaatcttgcatcgtttctcctgggtgtggtcagtaaaaatcttagcttttaatcatagaccgtctttttgcggctaacgtcctgcttttaacaataaccagataaacaccggcgcacccaacgttgcggtgaccacgccaataggcagctctgcggcagctaatgccaggcgcgctacaatatcggccagcagcaatgcgctcgcccctgccagcgcgcagccgggaagtaatgcgcgatgatcggttaaaccacacaaccgaagaatatgtgggatcaccagaccaataaagccgatagcacccgccagcgctacactgacgccaaccatccagccggtcgctgccaccagcacattgcgccagaaccacaggggtaaacccagttgccgcgccgagatctcgccaagtgctaacatattcatcggcctggactgacaacagatccacaacaacatggggatcaatgccagcatcagccagctttgccgccagtctacaccgccaaaaccgcccatcatccagtacatcagctgacgtaaatcaacagaggtggaaaagtagatagcccacgtcattagtgcgctacagataatccctaatgcaacgccagccagcaataaccgactggtcgaaagatgacgacgggcgaaacgtaagagtattaaagtgatgataagcgccccagcaatcgcacacagccctagcgcccagttggggagttgcccttgcccaagcaataccgcggcgataagccccacgcctgcgccgttagagacgccaagtagtccaggttctgccagaggattttcaaacaacgcctgcattacagcgccggatatagccagcgccgcaccaaccagcaatacagccagcgtacgtggcaggcgaatttgccagacgaacagttcgccacgaggagaaaaccagtcacctggcgagatccattgttcaccggcgcaaaggcttaagagaagcgccagcagcatcaaaactgacaggcataataaccagcgaatattttgtcgctgttgttggcgggcaagtgtcagcatggtatccgttctgctgaagtgtcatggcgttgattttacggtgactcttcgacagtgaaaaagaaaaagggccgcagagcggcntttttagttagatcagattantcgtctttgggcgaagcgttttcgacccggctttttaacttctgcccgggtctgaaggtcaccacgcgccgtgctgtaatgggaatatcctcgcccgttttcgggttacgtcccgggcgttgattcttatcacgcagatcgaagttaccaaaaccagagagtttcacctgttcgccgttttccagagcgcgacggatctcttcgaaaaacagttcaaccagttctttggcatcccgcttgctaagcccaagcttatcaaacagatattctgacatttcagcttttgtaagcgccataggttcaatccctcaatgatgcctggaatcgctcttttaatgcctctacacatttggcgacggtagcggcaatctcntcttcttcgagtgtacggctggtatcttgcaggatcaggcttatggcgaggctcttatacccctccgcaacacccttaccgcggtacacgtcaaataagtttacgccaactacctgatttacgccaactttcttacattcggataaaatatccgctgcgggaacgttttctgcgaccaccaccgcgatgtcacgacggttcgccgggaagcgagaaatctcgcgcgcctgaggcaccacgcggtctgcgagcttgttccactccagttcgaacaccagagtgcgaccgttaagatccagtttacgttccagttcaggatgaacaaccccaacaaaaccaatacgttcacctttcagataaatcgctgcggattgccccggatgcagtgccggattcgcttctgcacggaactcaacctcattcagtttaccggtcaggtcgagtacggattcaagatcgcctttcaaatcatagaaatcaacggtctcttttgccaggttccagtgctcttcgtaacggttaccgcaaatcacaccggctaacatcagatcctgacgaatgcccaacggtgcctgagtatctggtacgaaacgcagaccgctttcgaaaatgcgcacacggttctgctgacggttctggttgtacaccacggttgccagcaggccggtccacagagaaagacgcattgctgacatttcaacagagatcgggcttggcagcagtaaggcttcaacgcctggatggatcatctgctgcactttcggatcaacgaagctataggtgatcacttcctgatagcctttatcgttgagcagcgttttcacgcgcttgagcgacaggtcagcttcacggtgagtacccataatcaggcttgcctgtaccggctcatccgggatgttgttgtagccgtaaacacgcgcgacttcttcgaccagatcttcttcaatctccatgtcgaaacgccagctcggcgcaactgcctgccactcgtctttgccttcggtcacttcgcagccgagacgacgcagaatgtcagttacctgctcatccgcaatatgatggccgatcaggcgatccagtttgctacgacgtaaagtgatggttgcacgcttcggcagcgttgcttcgttggtgatatcaattaccggaccagcctcaccaccgcagatgtcaatcagcagacgggtcgcacgttccatcgctttgtactgcagtgccggatcaacgccacgctcataacggtgagacgcatcagtatgcaggccatgacgacgagcacgaccggtgatagacagcgggctaaagaaagcgcattccagcagcacgttttgtgtttcgtcattcacgccagagtgttcgccaccgaagatgccgcccatcgccagcgccttgttgtggtcggcgatgaccagagtgtcagcattcagcttcgcttcagtaccgtcgagcagcaccagcgtttcgccctctttcgccatccgcaccacaatgccgccttcaatgcgatctttatcgaaagcgtgcatcggctggcccaattcgagcagcacatagttggtgacgtcaacaactgcatcgatagaacggatcccgcaacgacgcagtttttctttcatccacagcggagttggcgctttaacgttaatgccttttaccacacggccaagataacgcgggcaggcttccggcgcttcgactgtaatcggcagcgtgtcgtcgatggtcgcaccaaccggaacgatttccggttcaaccagcggcagctgattcagcacggcaacgtcacgcgcaacaccaatgatacctaaacagtcggcacggtttggcgttacgctgatttcgatggtgttgtcatcgagtttcagggattcgcggatgtcagtgccaatcggcgcatctgcaggcagttcgataatgccgttatggtcgtcagaaattcccagctcagaaaaggagcacagcatcccttcagacggttcgccgcgcagtttcgccgctttaattttgaaatcacccggcagaacagcaccaatggtcgctaccgccacacgcaggccctgacggcagtttggcgcaccgcagacgatgtccagcaggcgatcgccgccgacattcacttttgtcacacgcagtttgtcagcgttcggatgctgcgcacactcaaccacttcaccaacgaccacgccgtggaagctaccggcaaccggttctacaccgtcaacttccaggcccgccatagtgatttgattcgccagcgcatcgctatcaatcgccgggttcacccattcgcgtaaccacagttcactgaatttcataatctattcctgccttatttaaactgtttgaggaaacgcagatcgttttcgaagaatgaacgcaggtcggtgacgccgtaacgcaacatagtcagacgctccatccccatcccgaaggcgaaaccagagtaaacttccgggtcgatgccaacgttacgcagcacgttcggatgcaccatcccgcagcccagtacttccagccatttaccgtttttacccatgacatccacttctgcagaaggttcggtaaacgggaagtaggaaggacggaagcgaatctgcaaatcttcctcaaagaagttacgcaggaagtcgtgcagcgtgcctttcaggttggtaaagctgatgttggtatcaacaatcagaccttccatctgatggaacatcggcgtgtgagtctggtcgtagtcgttacgataaacacggccaggcgcgatgatacgaatcggtggctgctgggctttcatggtgcggatctgtacgccagaggtctgggtacgcagcaggcgggtagcgtcaaaccagaaagtgtcgtggtcagcgcgcgccgggtggtgaccaggaatgttcagagcatcgaagttatgataatcgtcttcgatttccggcccggttgccacggtaaagccaagctcaccgaagaaactttcgatacggtcgatggtacgggtaaccggatgcagaccgccgttttcaatgcgacgacctggcagagagacatcaatcgtttccgccgccagacgcgcattcagtgcagcgctttccagttccgctttacgcgcattcagcgcctgctgaacctgctctttcgcttcgttgataaccgcaccggctgccggacgctcttctggcggcagctcacgcagggtcgtcatctgaagggttaagtgcccttttttacccaaatattcgacgcgcacattgtctaacgcggcaacatctgacgcctggctaatggccgccttcgcactggcaaccagttctgcgagatgtgacatggttttcctcattgtgtcagtggtgacactggttcgttggacttagagcctatcccatcaggctattttacttgccattttggtcccgggcagtgctcgaaatcctcacgtacttaagtacgctccggtttctccgcactggccgtatccagactggctgcgacaattacgcctgatagactggctttttatttttcaaaacgcgcanacaaaaaaagcctccactgggaggctttcaggcgctgttttccgtttctcttctcacgcgctagcctcctggattcaggtgctaaagtaaaaaaagaagcggaaaatagcagcattcattgcttgcgttaccttttggtactcttcaaaagacctttattgaaaaggctacggcgataaaagtcaatgttttgatggcgttgaaacgaaaagagggagactagctccctctttcaactggcttatgccagagctgctttcgctttttcaaccagagcggtgaacgctactttgtcgaatactgcgatatcagccaggatcttacggtcgatttcaacagaggcttttttcaggccattgatgaatttgctgtaagaaataccgttctgacgtgctgctgcgttgatacgcgcaatccacagttgacggaactgacgcttacgttgacgacggtcacggtaagcatactgaccagctttgataacagcctggaaggcaacgcggtatacgcgagaacgcgcaccgtagtagcctttagcttgtttcaaaattttcntgngacgtgcgcgtgcaataacaccacgttttacgcgagccatatgtgctctcctgtatctatattctaattaaaaagttaaaaacgttaacggcttatgcgtacggcaggcacgcgattaccaggcccagatcgcctttggaaaccatggctttcggacgcaggtgacgtttacgtttggtcgctttnttggtcagaatgtgacgcaggttagcgtgcttgtgcttaaaaccacctttaccggtttttttgaagcgcttagcagcaccgcgtacggtcttaatttttggcattttaataacttccacttcgcattgttaataaacgaaacaaaggcgaacaaagcctgtgaagcccgaaggctccacagacagtgctacttgaaggccttactgtttcttcttaggagcgagcaccatgatcatctggcggccttcgatcttcgttgggaaggattcgaccactgccagttcttgcaaatcgtctttcacgcgattaagcacttccataccgatttgctggtgcgccatctcacgaccgcggaaacgcagcgtgattttggctttatcaccctcttcgagaaagcgaatcaggctgcggagtttgacctgatagtcgccttcatctgtaccaggacggaatttaatttccttaacctggataactttttgctttttcttctgttccttagaagacttgctcttttcatagaggaatttgccgtaatccattatacgacaaaccggcggctcggcgttagggctgatctcgactaagtctactccggcttcttctgctttctccagagcttctctcagactcacaataccaagctgctcgccttccagacctgttaagcgaacttcctgggcgcgaatttcgccattgatacggttagggcgcgccgtttgaactcgttttccgcctttaataccttattcctccaattgtttaagactgcggctgcgaatctcttgttgcagcttctcgatcacttcatttacgtccatgcttcccaggtctttaccacggcgggtgcgaacggcaattttgcctgattccacctctttatcaccacagaccagcatatacgggacgcgacgcaaagtgtgctcgcggattttaaagccaatcttctcatttctcaagtctgctttaacacgaatgcccgcatttgatagtttttgcgtcaattcgttaacgtattcagactgtgaatcggtaatattcatgataacaacctgaactggcgcaagccaggtcgggaagaaaccagcgaattcttcggtcaggataccgatgaaacgttccatcgaccccagaattgcgcggtgaatcattaccggtaccttacgctcgttgtcttcgcccacataggaggcgctcagacgagacggcaaggagaagtccagctgtactgtaccgcactgccatgcacgatcgaggcagtcatacagggtaaattcaattttcggaccgtagaaagcgccttcacccagttgatattcaaacgggatgttgttttcttccagcgcaaccgccaggtccgcctcagcacgatcccacatttcgtcgctgccaatacgcttttcaggacgagtggagagtttgacgacgatcttctcgaagccaaaagtgctgtacatatcatagactaaacggatacatccgttaacttcatcgcgaatttgttcttcagtacagaagatatgcgcgtcatcctgggtgaatccacgcacgcgcatcaggccatgcagagaacctgacggctcgttacggtggcagctaccaaactcggccatacgcagcggcagatcgcgataagacttcagcccctggttgaaaatttgtacgtgacccgggcagttcatcggcttaatgcagtattcacggttctcagaagacgtggtgaacattgcatctttgtagttgtcccagtgaccggttttttcccacaggacacggtccatcatgaacggacctttaacttcctgatactggtactctttcagtttagaacgaacaaacacttccagttcacggaagatggtccagccgtcgttgtgccagaataccatacccggcgcttcttcctgcatatggtacaggtcgagctgtttaccgattttacggtggtcgcgtttcgcggcttcttccaggcgctgcaggtaannnnnaagcgcttttttgtctgcccacgccgtaccgtaaatacgttgcaacattttgttgttgctgtcgccacgccagtaagcccctgccgttttcattagtttgaaatgatggcagaaacgcatgttcggtacgtgcggaccgcggcacatatcgacatattcttcatggaagtacagacctggcttgtcatcatgggcgatgttttcgtcaagaatggagactttgtagctctccccacggttggcgaaagtttcacgcgcttcgtgccagctgactttcttcttaatgacgtcgtagtttttctcagcaagctcatgcatccgcttctcgagtgcttcgacatcttcctgggttaacgtgcggtcaagatcaacgtcgtaataaaaaccgttgtcaataaccgggccgattgccattttggtatgcggccaaagttgtttaatcgcgtgccctaacaggtgcgcacaggagtgacgaatgatctccagaccttcttcgtctttggcggtaatgatcgacagttgtgcgtcgttttcaatcagatcgcaagcatcaaccagttcgccattaacgcgccctgcgatacaggctttcgccagacctggaccaatgtccagcgcaacatccatggggcttacagcgtggtcgtaatggcgttggctgccatcaggaagagttataacaggcattttatatccttatttgcagtggtgacccacacgaaagatcacatacaaagaaaaatttgtttattaacagttcattgcgaaaccatctagccaacaaatgctaaattggttcgcaatcaggtacacaaatgaaagacattaacctctcaccttccacccggttgagcgatgttaacactaaaaaaagggagattgtacctttccgtttcacattgattcgattcgcaattcgtttgtagtgagtacaccagcaaaacgcttaaagaacaactgataacatcacggagcgtctgaaaggtttactgcgagcggatttacagcagcataaactgaatccagcaaagttcgttgcgtgatttggcggtactatttaaacgatcataagattaatgacgaagtggtcatatcacaatgataaaagtgacacaattcttatagcaatttttcgtgcacatttcgttctggcgataataattaatcatcatactcaaaacctccagacatatataaggcgaatagattatgagtcaaaacgacattattatcagaactcattataagtctcctcatagaatgcacatcgatagcgacataccaacgccttcatcagagcctattaatcaatttgcgcnccaactcatcaccctacttgatacctctgacttaagttcgatgctgtcatactgtgttactcaggaatttaccgcaaactgtcgaaaaatatcacaaaattgttattccactgccctttttaccattaactttgccacttcacccatccatgcagaaaatatattcattacattacactataaaaaagaaatcatttccttattactggaaaccacgcctattaaagctaaccatttgcgaagcatactggattatattgaacaggaacagttaactgccgaaaatcgtaaccattgtatgaaactgtctaaaaaaatccatagagaaaaaactatacaaccaacagtaaatctcaatggtagtgcatttttttcgcaatctccttctgacgctattttttgtcgccatctgtcattgcaatacgcacttgattcattgagaaatggaaaaggcaaggtcaacctgattaaacattactcctccgttgaatccatacagcagcatgtccccttagtccgggacgcggagttcagagcattacttcgccatcctcctgcagggagtcgcgntatcgcgagtaaggattttggcttcgctttagatattttcttctgtcgaatgatggcaaacaatgtcagtcatatgtctgcgattttatatatagacaatcatactttgtcagtaaggctacgaataaagcagtcggcgtatgggcaattaaattatgttgtgtccgtttacgacccgaacgataccaacgttgccgtcagaggcacccacaggacagcacggggctttctctcgcttgataagttcatcagttcaggtcccgatgctcagacctgggctgataggtatgttcgcaactgtgcaattgctattctgcccctattacctgagggagttccaggggctattttcacgggtatcgcgacacgaatgccatttgcccctatacatccatcggcaatgttgttaataatggccacaggccagactcaacagcttattacattattcagacagttgcccatactccctgaaaaagaaatcattgaaataataactgcgcagaatagcattggtacacctgctttatttttggctatgatgaacggacatactgacaacgtgaaaatatttatgcaagaaattcagtcactggtagataatcacatcattcatgaagataatctggttaaattgttgcaaactaaaagtgctaacgaaacacctggactttatatctccatgttgtatggattcgatgagataatcgatatctttctgaatgcattaaccactcctatagcacaagagcttttaaacaaaaaactggtgatgagtattttagccatgaaaatacatgatggtnagccaggattatacgccgcaatggaaaataatcaccctttgtgtgtcacacggttcctctctaaaattaatggcatcgcctttaaatacaagttgagcaaagctaacatcatggatttattaaaaggcgctacagcacagggaacccctgcattatacatcgctatgagcaagggtaatgaagacgtcgtgttatcttatatatcgacgctgggtgcttttgcaaaaaaacattcttttagtcaacatcagttatttacactgttggctgctaaaaatcatgacaacatgtcagctgttcatatagccattcatcataatcattataaaactgtagaaacatattatgctgctataaatgtaatcagccaaagcatgagttttagtgctgatgaattaaagacgtatttataaccagctatttacgatatttatatatcgatacataattttattttttcataaaacgcagaaacagtgatcaggtgtacaacgccacccgacggctgtaataacaaaaaatcccttgatgcctgtcccttttgttacactccgttatcacgcacaagagatatgcaggacactggtatgccgactaaacgctttgataaaaaacactggaagatggtggtggtgctactggcaatctgtggcgctatgttgttgctacgttgggcagcaatgatttggggctgagcagtgacaaacgaagacagccagaccgcataacacggtccggcagataattttacatgctgtagcccagcgataaggttgtccgacggtcggtatgttccggtgcagactctggaggttcagagttccatgtgacgttgtaagccaccttcagtccaaaatgttcattaatagcaacatttaatgcgctttcggagttcagcgttgtgtcttccgcgccaaagacggaaacaccctgcgtaaatttagcgttgtcagtaagctgccatgcataagcaccggaggcatagcccagcggctgagtttcactggcattgtcggtatatttgtcgtaacgcacacctggaccgaattcaaagcggaaactgtgtaccgggccattcaaaaactgacgaccataacccgcggtcaacacatcgcgctctcgatagccgttataacggtctgtcagccagcttgcctgaccaaataaatagtcataatcagttaaattaaaacggctacgcccgcccgccgcatatttttctgaagaacgctcatcattagaagaagtattactggcgttcccccacagcgaccaggcagtggtttgtccataccaggtcatggtggtgtcagccgtaagtgaggagcttttcgtattgcctgattgtgcaagataccntgcgttcagattaccttcgaaaggttttttagcgctggcaggatcgtccatgacagtaaaaacggaatcatcggcagctgcattcagtgacgcaaacatgccccccgccaacataacgatggcaggaactgtcttcaaaagcttcatttatcaagagtccgtacaacaaaaaaagagaccatcgcggtcccggaaactttcttaaggatcaaagattagcgtccctggaaaggtaacgaattataaaaaggcgcgaataacttatcaatgtattcttatttcattttttgaataagcatgtggcgaaaacagatttttatttatatatannnnnnnnnanaattttaaataaagctccaataaatcatattgttaatttcttcactttccgctgattcggtgccagactgaaatcagcctataggaggaaatgatggtacgtatctatacgttgacacttgcgccctctctcgatagcgcaacaattaccccgcaaatttatcccgaaggaaaactgcgctgtaccgcaccggtgttcgaacccgggggcggcggcatcaacgtcgcccgcgccattgcccatcttggaggcagtgccacagcgatcttcccggcgggtggcgcgaccggcgaacacctggtttcactgttggcggatgaaaatgtccccgtcgctactgtagaagccaaagactggacccggcagaatttacacgtacatgtggaagcaagcggtgagcagtatcgttttgttatgccaggcgcggcattaaatgaagatgagtttcgccagcttgaagagcaagttctggaaattgaatccggggccatcctggtcataagcggaagcctgccgccaggtgtgaagctggaaaaattaacccaactgatttccgctgcgcaaaaccaagggatccgctgcatcatcgacagttctggcgaagcgttaagtgcagcactggcgattggtaacatcgagttggttaagcctaaccaaaaagaactcagtgcgctggtgaatcgcgaactcacccagccagacgatgtccgcaaagccgcgcaggaaatcgttaatagcggcaaggccaaacgggttgtcgtttccctgggtccacaaggagcgctgggtgttgatagtgaaaactgcattcaggtggtgccaccaccggtgaaaagccagagtaccgttggcgctggtgatagcatggtcggcgcgatgacactgaaactggcagaaaatgcctctcttgaagagatggttcgttttggcgtagctgcggggagtgcagccacactcaatcagggaacacgtctgtgctcccatgacgatacgcaaaaaatttacgcttacctttcccgctaacaaaaacattcccccagcattgggggaatcatcaccaacctgtcggcaacgcgtttctccgactatgctcaaaagtcatgtgataacaaaggggtgaactatggccagtggcgatcttgtccgttatgtcataaccgtcatgttgcatgaggatacattgactgaaattaacgagttgaataattacctgactcgcgncggttttttgctcaccatgncggatgatgagggaaatatccatgagctggggactaacacttttggacttatcagtacccaaagtgaagaagaaattagagaactggtttcggggcttacccaaagtgcaaccggcaaagatcctgaaatcaccatcacgacctgggaggaatggaatagcaacagaaaataaatggtttttgggcaataatcagtctgtggtgtgcgttagctcgtgtttttacaccgcattcttgcgctaaccttatgatctggcagacaacatgggagagacatcatgtggcaggcaatcagtcgtcttttgagcgagcagttaggtgaaggcgaaatcgaactgcgtaatgaactgcctggcggagaagtccatgccgcatggcatttgcgctatgcaggacatgactttttcgtcaaatgtgatgaaagggaactgcttcccggttttaccgccgaagccgaccaactggagttactgtcgcgtagtaaaaccgtcaccgtgcctaaggtttgggcagttggcgctgaccgtgactacagttttctggtgatggattatctcccacctcgtccgctggatgcgcatagcgcatttattcttggtcagcaaattgcgcgtttacatcaatggagcgaccaaccacaatttggactcgattttgataactcgctctccacaactccacagcccaacacctggcaacgtcgctggtcaacgttttttgctgaacaacggattggctggcagttggaactggcagcagaaaaagggatcgctttcggcaatatcgatgccatcgtcgagcatattcagcagcgtctcgcctcacatcaaccgcagcnttntctgttgcacggcgatttatggtccggcaactgtgcgctgggtccggatggcccgtacattttcgacccggcctgctactggggtgaccgagagtgcgacctggcgatgttaccgctgcatactgaacagccgccacaaatctatgacggctatcagtcagtatccccgctacctgccgatttccttgaacgtcaaccggtttaccaactctacacgctgttaaatcgtgcaagattatttggcggtcagcatttggttattgctcagcagtcactggatagattattagcagcgtgatatgggttgaagataatggccgctccgtgcggccttttgattaaataaacccaagcagagaaaagaacacataacctgcagcaatacaaataaccggcaggatatacagtgagaaaaactgcaggaaaatagtatggtgcggaacaacaatacgtgactcaatttgttcacgcgttagcccctcttcccctttggctttttccagaatgagttgatcttcaacaccttcccgcaagaagcgcgcctggcgactcatccgggtaccggaatcctgcaacgccagtccgacaaanatcaggatgaaaatcacccagaacataacgttcacgccaccattaaaattgggcgtcggggagttataccagaacagattcaaaaaaggcgtattcgcctgcatcatatcgatcatgacatgagtaaagtcgagcatgaccgcattaatgccttcctggttttcctgccgggtattcataaatttcagcaaagaaatcaatgtagagatcaatgcaggtataaaaatcacccaacccataatccttttcaaaacagcaatgcgtccagcttgttgatacgtcatgagttctccttgattaagacgcgtcgtttcacttagtttacctgtagatatctgttttcgcccattctttaaaggcgatatgataggcgcttaatcataagcacggcttaataccttacacataatgctctaaaggagaggttgtaatgtcaaccccgcgtcagattcttgctgcaatttttgatatggatggattacttatcgactcagaacctttatgggatcgagccgaactggatgtgatggcaagcctgggggtggatatctcccgtcgtaacgagctgccggacaccttaggtttacgcatcgatatggtggtcgatctttggtacgcccggcaaccgtggaatgggccaagccgtcaggaagtagtagaacgggttattgcccgtgccatttcactggttgaagagacacgtccattattaccaggcgtgcgcgaagccgttgcgttatgcaaagaacaaggtttattggtgggactggcctccgcgtcaccactacatatgctggaaaaagtgttgaccatgtttgacttacgcgacagtttcgatgccctcgcctcggccgaaaaactgccttacagcaagccgcatccgcaagtatatctcgactgcgcagcaaaactgggcgttgacccactgacctgcgtagcgctggaggattcggtaaatggcatgatcgcctctaaagcagcccgcatgcgttccatcgtcgttcctgcgccagaagcgcaaaatgatccacgttttgtattagcaaacgtcaaactctcatcgctgacagaactcaccgcaaaagaccttctcggttaatgaccaggggcagtgatcacgctgcccctggttctttatctgaatttgcattcaactgacggattaatcgtcaatttaagagaaagagttacaccgtcaccacttccgtgcactgtataaaaatcctatactgtacgtatcgacagtttagtgagttttatcatgacggcggaaggtcaccttctcttttctattgcttgtgcggtatttgccaaaaatgccgagctgacgcccgtgctggcacagggtgactggtggcatattgtcccttccgcaatcctgacgtgtttgttaccggacatcgatcacccaaagtcgtttcttgggcagcgattaaagtggatatcaaaaccgatcgcccgcgcttttgggcatcgtggttttacccacagtctgctggcggtatttgcgctgctggcaaccttttaccttaaggttcctgaaagctggttcattccggctgatgcgctacaaggaatggtgctgggttatttaagccacatacttgccgatatgctgacacccgccggtgttcccctgctctggccatgccgctggcgtttccgcttgcctatcctggttccccaaaagggtaaccaactggaacgttttatctgcatggcattatttgtctggtcggtatggatgcctcattcattacccgaaaacagcgctgttcgttggtcatcgcaaatgatcaataccttgcagatccagtttcatcggcttattaagcatcaggttgaatactaaaaaggcaaaaatcgcctttctgtaataagcaattccatttgaatataagagccagctcacagttctgttaatcttgcgccaacactatgactgctacgcagtgatagaaataataagatcaggagaacggggatgaactttccattaattgcgaacatcgtggtgttcgttgtactgctgtttgcgctggctcagacccgccataaacagtggagtctggcgaaaaaagtgctggtgggtctggtgatgggtgtggtttttggccttgccctgcataccatttatggttctgacagccaggtacttaaagattctgtacagtggtttaacattgttggtaacggctatgttcaactgctgcaaatgatcgttatgccgttagtcttcgcctctattctgagcgcggttgcccgtctgcataacgcatctcagttaggcaaaatcagttttctgaccattggtacgcttttgtttaccacgctgattgcggngctggtcggtgtgctggtaaccaacctgtttggtttgacggctgaaggtctggttcagggtggtgcagaaactgcacgtctgaacgccatcgaaagtaactatgttggtaaagtctctgacctgagcgttccgcagctggtcttgtcctttatcccgaaaaacccgtttgccgatctgaccggagccaatccgacgtcaattatcagcgtggtaatttttgccgcattcctcggtgtagctgcgctgaaactgctgaaggatgatgcgccgaaaggtgaacgcgtcttaaccgctatcgataccctgcaaagctgggtgatgaaactagttcgcctggtcatgcagttgaccccttacggcgttctggcactaatgaccaaagtggttgcaggttctaacctgcaagacatcatcaaactgggaagtttcgttgtcgcgtcctacctcggtctgctgattatgtttgcagtgcatggcattctgctgggcattaatggcgtgagtccgctgaagtacttccgtaaggtatggcctgtgctgacgtttgcctttaccagccgttccagtgctgcgtctatcccactgaatgtggaagcacaaacgcgtcgactcggtgttcctgaatccatcgccagtttcgccgcctctttcggtgcgaccattggtcagaacggctgcgccggtttgtatccggcaatgctggcggtgatggttgcgcctacggttggcattaacccgctggacccgatgtggattgcgacgctggtcggtattgttaccgttagctccgcaggcgttgccggtgtcggtggtggtgcaactttcgccgcactgattgtgctgcctgcgatgggcctgccagtaaccctggtggcgctgttaatctccgttgaaccgcttatcgacatgggccgtacggcgctaaacgttagtggctcgatgacagctggcacgctgaccagccagtggctgaagcaaaccgataaagccattctggatagcgaagacgacgccgaactggcacaccattaattcttatgctggcaacggtccgttttgtaaaggggccgttgccttactttttaaatgttccatcgcggcgatgcatactgactcatatttaaacagatcgtcagcgaaaaaatgtccaacttatcaatacattcctggctcaatgaatgtgcctgtagcgagaagcttaaaacctcatacccgagacgttttctaagtgaactatctggaatactcataatatcttcaagtataccacttcccattcccggaagatttagtggattaaaaagaagattgatattaagcattgatattatcgaaggaaactttaggagactctcatttttttgaatcgcagcaaaaatgctcccgacaggatgtatataatattgttcatagtatatagtccttaaatagtgaataaccaacctgttttttatactgatcaaattggtcattttttctgggcgaaatacagaagtgacatccattccaataaaatctttatttatacctcttatccgaatttcactaccataaagattattaattattactctatatttaacattgtcctgcagatatgtatcaaaactaagtgctggcgctcctggctttgaggcatcatagttaatgttagacatataggcaatcatataattaaagtttgattctgctatttcatcgcagtcacattgacccgttgatataaagaaagtgagtgctgtcatagtagactgcagcctttctttaaaagagtcgaaagccaggcttntaatatttaaatcaccataattactctgtattaagtttgtagaaaacatctcccgcctcatattgttaacnnnnttattatctcatttaaatctaagtcatttacaatataagtttaagagcgacgccacaggatgaactatcaaaaatagctcatcatgattagcaaaacttaaccattttaaaataaataaacaattaaagaaaaaagatcacttatttatagcaatagatcgtcaaaggcagctttttgttacaggtggtttgaatgaatgtagcaatgaaatagagaatttcaggccatgtaactcccggcaaaaccgggaggtacgtaatctttactcagtcacttccccttcctggcggatctgatttgcccaacgctgggcggattcaggcacagtaaacgccggtgagcgcagaaatgactctcccatcagtacaaacgcaacatatttgccacgcagcatccagacatcacgaaacgaatccatctttatcgcatgttctggcggcgcgggttccgtgcgtgggacatagctaataatctggcggttttgctggcggagcggtttcttcattactggcttcactaaacgcatattaaaaatcagaaaaactgtagtttagccgatttagcccctgtacgtcccgctttgcgtgtatttcataacaccgtttccagaatagtctccgaagcggggtctggctggtggtctatagttagagagttttttgaccaaaacagcggccctttcagtaataaattaaggagacgagttcaatgtcgcaacaaaacgaaaagaacccacatcagcaccagtcaccactacacgattccagcgaagcgaaaccggggatggactcactggcacctgaggacggctctcatcgtccagcggctgaaccaacaccgccaggtgcacaacctaccgcctcagggagcctgaaagcccctgatacgcgtaacgaaaaacttaattctctggaagacgtacgcaaaggcagtgaaaattatgcgctgaccactaatcagggcgtgcgcatcgccgacgatcaaaactcactgcgtgccggtagccgtggtccaacgctgctggaagattttattctgcgcgagaaaatcacccactttgaccatgagcgcatcccggaacgtattgttcatgcacgtggatcagccgctcacggttatttccagccatataaaagcttaagcgatatcaccaaagcggatttcctctcagatccgaacaaaatcaccccagtatttgttaggttctctaccgttcagggtggtgctggctctgccgataccgtgcgtgatatccgtggctttgccaccaagttctatactgaagagggtatttttgacctcgttggcaataacacgccaatcttctttatccaggatgcgcataaattccccgattttgttcatgcggtaaaaccagaaccacactgggcaattccacaagggcaaagcgcccacgatactttctgggattatgtttctcagcaacctgaaactctgcacaacgtgatgtgggcgatgtcggatcgcggcatcccccgcagttaccgcaccatggaaggctttggtattcataccttccgcctgattaatgccgaagggaaggcaacgtttgtacgtttccactggaaaccactggcaggtaaagcctcactcgtttgggatgaagcacaaaaactaaccggacgtgacccggacttccaccgccgcgagttgtgggaagccattgaagcaggcgattttccggaatacgaactgggcttccagttgattcctgaagaagatgaattcaagttcgacttcgatcttctcgatccaactaaacttatcccggaagaactggtgcccgttcagcgtgtcggcaaaatggtgctcaatcgcaatccggataacttctttgccgaaaacgaacaagcagcattccatccaggtcatattgttcctggtctggacttcaccaacgatcccctgttgcagggacgtttgttctcctataccgatacacaaatcagtcgtcttggtgggccgaatttccatgagattccgattaaccgcccaacctgcccttaccataatttccagcgtgacggcatgcatcgtatggggatcgacactaacccggcgaattacgaaccgaactcgatcaacgataactggccgcgcgaaacaccgccgggaccgaaacgcggcggttttgaatcatatcaggaacgcgtggaaggaaataaagttcgcgagcgcagtccatcttttggcgaatattattcccatccgcgtctgttctggctaagtcagacgccattcgagcagcgccatattgtcgatggtttcagttttgagttaagcaaagtcgttcgtccgtatattcgtgagcgcgttgttgaccagctggcgcatattgatctcactctggcccaggcggtggcgaaaaatctcggtatcgaactgactgacgaccagctgaatatcaccccacctccggacgtcaacggtctgaaaaaggatccatccttaagtttatacgccattcctgacggtgatgtgaaaggtcgcgtggtagcgattttacttaatgatgaagtgagatcggcagaccttctggccattctcaangcgctgaaggccaaaggcgttcatgccaaactgctctactcccgaatgggtgaagtgactgcggatgacggtacggtgttgcctatagccgctacctttgccggtgcgccttcgctgacggtcgatgcggtcattgtcccttgcggcaatatcgcggatatcgctgacaacggcgatgccaactactacctgatggaagcctacaaacaccttaaaccgattgcgctggcgggagacgcgcgcaagtttaaagcaacaatcaaggtcgctgaccagggtgaagaagggattgtggaagctgacagcgccgacggtagttttatggatgaactgttaacgctgatggcagcacaccgcgtgtggtcacgcattcctaagattgacaaaattccggcgtaaatatggataaggtcacgtcccctggggagtgaccttaccnccttacttacacatcaagataactacccaaccgataaccacgctcagcaattgcatatttcaacgacgctgatgtcagcacttccagctccgttaaccgtgggaaacagtaagcactctggcgaatcgtattatcgacaaacgccggatggcacatgacttccagcgagcgttccccgcgatggctggaatcatcaagcacttgcaggaacagtgcctcgctaatctcttcaccataaaatgcgctactgaatccgtgcgaactgcgcagattagccggtaaatcaccagcgttagatagcggctgacggtcgatgcgcaacgcaatcccctcttcagccgcaaacctggcaacaatagggaaaatctgcgggaacatatgcacatgatgatggctatcaagatgcgtaggtttgcgtccaaatagctcaatgaaacgcaaatactgactggcaagctcctgagtaatttcttccagcggtaaagcatcttcttctgccaactgccagatccattttcccagcacaccatcgcgggttaaccccggcatagctgtcagtggcttgcccatagtaaggacaaagtgcatccctatggccagactcggttcatcacgactcaactgcaccgcatggtcaatagcctgcccattcaccagcgccgtcgtcgatgtgacaatcccattgcgacaggcctcgataatgccgtagttctgacctttgcttaagccaaaatcatcggcattaacaatcagtaagcgttccataatcagcctcggttaatgtgcttttttaagctctgcgatgcagtcggcaaaatttggcagccatttctcgtgcgccagaatcatctcgcgtgccagcagctcagcatcgcgatcggaatgcaccaacggactaaggtttagcgccagtaacacatcgttaaattctccgctaagtgcggcgttgctggcagcaatctcgaagcctttaatggtgtgaatcagccccatcactttatcatcgaaatgcgtaatgcgcggatgtggcgtcgcgccatcgcgccccagcgtacaggtcatttctaccgcccagtctgccggaatattatcaatatgcccatgatgcgggatattaacgtaatgttctgcttgcttatcgttgtagatagcgttgatcacttcgcacgctgcatcagagtaataagccccaccgcgctgttccagttctttcggcttaactttcaactccgggtttttatacagctcaaaaagttgtttctcgactttctgtactacctgcgctcgtgcgccgcctttgtagtattcgcccatttcaatagccagcatctctttttgcttgaagtaataaagcaaataagaacacggcaacagattcagagaacgaattaagccttcgctaaatggcagatcgaaaatatttttaacgccagatgcttttaactgcccggatgccacaccatcaagcaattcggcaaagcgcgacttgccatttaccagcacatccttaatgaacaccatatggttgaggccgaacagatcgatagataaatcatcgctgtctttcagcatcagaacatcgcgaataaacatcttcatgccgatcggaatattacacacgccgataaagcgtttaaatccggtatgacgataaacggcttcagtgaccattcccgccgggttagtgaagttaatcacccatgcattcggacaaagttcttcgacatcttttacgatgtcaaaaatcaccggaatggtacgcagacctttaaacagaccgcccgcgccgttggtttcctgaccaagataaccatgacttaatggaatacgttcatccagttcacgcgccggtaattggccaacgcgcagttgggtagtaacgaaatcagcatctttcaatgcttcgcggcgatccagcgttttataaagcttcatcgggacgccagcgttatcaatcatccgttggcagagatcgaaaataatatccagtttagctttgccaccttcgacatccaccagccataattcgctgaccggcaattcgtgataacgcttaataaatccttccagtaactccggggtatagctgctcccgccaccaatagtgacgacttttaatttctggctcataatttctcccttcagtacagaatactgatatctggcatatctgccccccccggacataaataatccagcaacaggacagatatgtgaattgtcaggtataacgacttactgattaaattcagtcaatttcttacgatagctcttaggcgtaaaggacgttaatttcttaaacgttttaataaacaaactcgggctactataaccggcctcaaacgcaatatccgtcactgaatagttggtcatttccagttgttttttggcaaaattaatacggatttcattaataatctgcattggcgttttgccataatatcgttgagtcgcccgcgtcaaatattcctgtgatttggctgacaacgtcaccatattctccagcgccgattcactaaactgctctttatcatgcatcttttctaccgtacttttcagccactgcggtacatcatcaatcacctgttcttcgcggtaatgacgtaaacggttaatgacataaaaagtaaccatctcaacaaactcttccagccctgtttcgcggaaattcaatgaagaaatcactgtttccacataggtgagaaaagcgttattggtccggtatacctgcgaagctacaaagcaataaggcaacaatggcaggtaatgctgctcaaaaaagcgtttactgatcccaacgttcaatatgcgcgtggcaccaaactcataaaaactttgatggtgcgaacctaacggaataaaaacaaaatcgccccgttccagtaacacgcgcttaccgttaatctcctggaaataacgcccggttaataccagagtaaattcataatagtcgtgctgatgcagtccgctgatactctcagttttgttatagataaacacatggaagtttttgccattaaacaactgctgttctcgggcagtggcaatttccggcgcgttaatcactggctgcatcatcgactccttatgccttcagtttttcatgaagctcaattaattcagtaatcagttcacgcgcaagcatggacgtcattaaatgatcctgagcgtggaccagcaccagactcactttcatcttaccttcgcccgcatcgccttcaatcagtttcgtctgtaccagatgcgcttcattcaatgccatccgtgactgatccatcatggcttttgctgcggcaaaatcgccctgcttcgcctgtttcagtgcggcatacgccaggctgcgcgcttgtccggagttgatgataagccccatcaccacttcttccagctcttcagcttccgtttgcgtatcgggaatattatcgagatccatcatacatcgttcctctcttttcttaccggcacgattacccgtaccggcatcgattaaaatttcagggcgttagcgatatcttcttcgctctcttctttatcaatcgcattttgtgctttgttagccaccacaacaaagggcagataaattaacgttgcgataccaaggttgaagagtgcaaccagcaatgcggcgacgctaccgttggtgttaaagaaggctcccagaccggttggcatggtccacggtgcaatattggtcaccggaggaataatgcccatatagtacgctgccagggtgattgccgccagaatcggttgtaccagtacaaacgggataaacatcaccgggttcatgataattggcagaccaaacagaatcggttcgttaatctggaagatgccggacggcagcgccagttttgccacctgacgataatcagcacggcgagaggcaataaagatagccaggatcaggcctaaagtcgcaccactgcctccaaggaaaataaaggagtccagcatcggcttggcccagatatggaaggtcttaccggctgccagcgccgcttcgacggaaccatattgctgataggtcgcgatattttccagcgcccacggcgtcataatgccgttgtccagtgcggtcagcgccagcgcgccatgaataccgaagaaccagagcagtggaacaaagatcacataggcccagcccaccacgctacccaacgatgccagtggggttgagatggtatccataatgatctgatggaagttggtgccccaggtattcaacgcccaagcaataatccccatcacggaaagaataataaagccgggaattaatgccgagaaggaacgcgatactgaagcaggtacgctgtcgggcagtttaatgacccaattgcggcggacaataaaggtaaacatttctgccaccaccaggccaataataatcccggagatgatattcgccccacctaaccagtttgcgccaaccgcataggcctcaccgacactatatggggtgacggtcataaatgctgcaacggataacaacccagccgccagcgcatcgactttacgctcttctgccagcgccatgccaataaagaacggtgccattaaagacattatccctaatgttccgttatatacgttgccgccaatacctttcagaccattaagtgtttcaatggttgaggcgtcgaggcgaatacctaaggaataaaaaaacgacccctccccaaagnttagaaaaacgttgttaattaatacaaacatggcccccgcaagggttaacggcattaagcgaataaagccatttttgattgcattaacgtgtggctgctttcctattttaactgcaaaagggaggagtaccttttcaagcgatgcaataacattactcatagaaaaatacccttaaaaaccgcaatttaaatattgnggtattgatttatgaaataactctttgacgggaaaatttaaaataaattaatttgctgcggcttttttaatcgctgcaaccgcagccttaagcacgcctaaaccatcgactttgccataaagcagcgagtcaattacttcaaccggtttgttgggtaacaaacgctggatttcgggcaacatataagcaatctgcggccctaataacacgacatcggcattctgacctttttcaccagccagtgtttccggaaatgcttcaataatgaccggaacttcatatttttctgcctgtgcgcgcatttttgataccagtaaagaggtagacatgcccgcagaacaaaacagataaatgtgtttcttttccataaaactgccctcatcgacgattatctgtcagccagacactccgcaagccttaacctgcttccatgctctgggtaacttgcgaaaccaacatgactttttttgtggctgaaaggagtatacggtatagacctgagcaatagtatttctttgaccttataaattgtctctccttgacctgcggttatgaccctcttcacatttcgggcaaataattcgcgaagataattaagaactcaggccaaaaaaaaaccggcgcaatggccggtttccgttgttactcaagctttcagacgaagtgattacttcgcagcctgtggatcagtgtcgtattcagcacaggtctgataaccggagttgatgacatgtccggtatcatctaacgcgacaaagtaggtttctgctttaccatcacgttgacccaggatgtaggtctggcaagtaccacgagcatggatcatgctcacttcagacgaaggtttaccncgcaatttgtgcaacctgcgcccggctcatgccttttttgacgtctttcaccacaggctgtacaaactggtctttggtacgatcataagccgtacaacccgccagcatggttaataccgccgctgcactcagaattcctgccatattcttgttcatattccgtcctcttgtttatcagcgtgttagataagcctggaatacattgggcgctttttcaagcccatgaacgaaacggctccgctttcagaggattcctgtatgacgttttaaccaccattcagcccgctgtcgcttgtcgtttcagtagcaacgggttagctttaaggaagttttgtcttttctgtctggaggggttcaatgacattgcaacaacaaataataaaggcgctgggcgcaaaaccgcagattaatgctgaagaggaaattcgtcgtagtgtcgattttctgaaaagctacctgcaaacttatccgttcattaaatcactggtgctcgggatcagcggcggtcaggactccacgcttgccggtaagctgtgccagatggcgattagtgagctgcgccaggaaaccggcaacgaatcactgcaatttattgccgtacgcctgccctatggtgttcaggccgacgaacaagattgccaggatgccattgcctttattcaaccggatcgcgtattaaccgttaatatcaagggcgcggtattggctagcgagcaggcattgcgggaagcaggcattgaactgagcgattttgtccgtggcaatgaaaaagcgcgtgagcggatgaaagcacaatatagcattgcgggtatgaccagcggtgtcgtggtgggcaccgatcatgcagcagaagccattaccggattcttcactaaatatggtgacggcggtacggacattaatccactgtatcgtctcaacaaacgtcagggtaaacagttactggcagcattaggttgcccggaacacctttataagaaagcgccaacggccgatctggaagatgatcgcccttctctgccagatgaagtggcactcggcgtgacctatgacaatatcgacgactatctggaagggaaaaacgtacctcaacaggtcgccagaacaatagagaactggtatctgaaaaccgaacataaacgccgtccgccaattaccgttttcgatgatttctggaaaaagtaataatttgcacctattggattgtgcgaaaaagagtaatttgttcacgccggatnnggcgtgaacgccttattcgacctacaaaactatgcaaattcaatacattgcaggagtcgaataggcctgacaggcgtagcacgtcagacggtgtaacctttgtcatcgacccgcctcttttttaatcgcttcccggctgttacactggatagataaccagcattcggagtcaacagtggtacggcgtttaacttctccgcggctcgaatttgaagctgcggcaatttatgaatatcccgaacatttacgttcattccttaatgacttacccacccgaccaggggtgtatctgtttcatggcgaaagtgacaccatgccgctctatatcggcaaaagcgttaatatccgcagtcgggtgctttctcatttacgcaccccggatgaagccgccatgctacggcaatcccggcgaattagctggatctgcaccgcaggcgaaatcggcgctctgctccttgaagcgcgattaatcaaagaacaacagccgctgtttaataaacggttgcgccgcaatcgccagctctgtgccctgcaattaaatgaaaagcgcgtcgatgtggtgtatgccaaagaggtggatttttcacgagcccccaacctgtttggcctgtttgccaataggcgcgcagctttgcaagcattgcagagcatcgctgatgaacaaaaactttgttatggtctgttgggactggaaccgttaagtcgcggtcgtgcgtgttttcgttcagcgctaaaacgttgcnccggagcatgctgcggtaaagagagccatgaggaacatgcgctacgcttgcgccagtctctggancgtttgcgggtggtgtgttggccttggcaaggggcggtggcgctgaaagaacagcacccggaaatgactcaatatcatattattcaaaactggctgtggctgggggcggttaattcgctggaagaagcgacaacgttaattcggacacccgccgggtttgatcacgacggttataaaattctttgtaagccgntgctttccggtaactatgaaattactgaacttgatccggcgaatgaccagcgagccagttgatttcactgaacaacagtttaccttgcggttgtaaaagccgcagggtgtgcctgccatcgaaccagcacgcgccctggtcggtagtgagcagtttgtcgcccagttgccacgccccgttaatcacaaacaccaccccgccgcgtgagccaaaggtagtaaacgtacgttcggcaattctgactttcgccttacagacatccangcgcgtcataatattgaaatccatcgacatctgccctgccgtcagtttcgcttttaccacctggtccgccgcaaaggcaaaaggctgtaacggttttaaggtatggttaaagtggtctgcgctttcaaggaacatctcgccgccttccagcaacgtcactatcctttccataccaggaaacaaagaaaactccccattcgccgcgatggatgcaatgctggcacgccagtaaaaatcacgttttgccggtgggaaagtgcaaatttcgcgcgtttcaccggcagcgtttcgccacaaattcaccgacattttacgcatatcaaagtattccatactcgctcccggcccgttcttttcattgttatcgttcaggtaaccgtggatggttatcggcaactcgggtgatttacgttagtggtgatcaggctttttttacaactgtttgagaagagaaaagaaaaccgccgatcctgtccaccgcattactgcaaggtagtggacaagaccggcggtcttaagttttttggctgaaagattattcagcagttgcaggcattttaccttttgccgctggacgttctgtcagacgcttctcaaaattagcattaaattgctttttctgttccggcgtcaggatgttgtaaattttgttctgggtttccatgtgcgccagcatgttagctttgcgctgttcttccatttttgcgatctgcgcttcagcttttgctttatcgaaggtatcgctggcaatgatgtcatgcattgcgcgacgttcttccagcggcggacgtttcatctggtcacgctggcctttcatgatttcgcgaatctgctgtttctgcgcgtcggtcaggttcaggtctttgaacatcatgtcctgatgcggaccgaacttgcctttgtggtgcatcatcggcttcgcgtcagccggtgctgcggtagtggtgtctgcggcatgggccaggttagccgcgccaagagccagggtagaggcaacaaacagtgcagttaatttacgcatattctatatccttcctttcagttatttattacggctttcttaagtagcgtgccgtgttgacgagattaactttactgactttagcgtcaattaatcagagcaacggtaaaacaatgaaagtgtaaaaaacacttttgcgccaattatggagaaaaaaagaaaatttgatggagagtgatgagagaatattacaacaccatgattttgcagagattatgaagaactataccggatgactggtgataaataaagcaaataaccaggattaatctgtattaatttataagaaggtaacttaatacccgcagaaagatttctgcgggtaagtattagcttattttttcgagcattaatcccgcgcgtaatcccaacgctaccaacggattagggaataacacatactctacatcatgggttacggtaaaacgttcctcaccgtcctgcgccagcaacgttcctttcttaaacggcataaaattcagcgtgtcacttgccatatgcatttcgaaggacggcgagtggcgagtaatttgcgaaaccacccgataacggagcggcggtgttctcacgataccgacactctcaccagatagcagcgcagcgattgcgctggcagttactgcaaactggcgaagatcgttttgcccaaagggcaacgctttgccaagttccagcgtacaggccagcgcgccaaaatgtctggcgctgaaatgggtaaacgtaccaccaggctcctgatggaacaccagcgcctccagccccgccgcacccagccacgtcaggaatttctcgtcccagggaatgtcgcgttgcggtaatacaccgaactgcggatgcaaggagccacgaattgcggtatgtagatcaaggtgccagcgcacagattctttgccctggtcataaaaatcttccaggcactgttccagttcgcgcgcccgacaggtttccccgctttcagcaaacagctgccaacgaccgccaaacattcggttcatatcgctatggcaataacgtttcccttgcttcagcgcaggaggattcccgaggatcaccagcaaccgccaccgtaacgggatctcgccgtgagatatcgcgccaagcaatgcatcaagcatctccacaggtgccgtctcattaccgtggatccccgcagaaatcaccagagcgccttgcggtggcgttaatggcgtcagttccagcacaccatcgcccagccagcgccagcgaacgccgttgatttctcgctcggtgatgacaggttttttactcgttaaggtcagagcaagaaaattatccattgccccntccctcgcgntggaacggataaaccgaaccgagattcagtaattggctcaatacatccagtgcttcccgcccttcgcgcagcaattgcgggtcggccagatcggcagcagtaagacgatcgcggtagtaacgatccacccagtcattgagcgcattaaacaaggtatcgttcatcatcaccgccggattcaccgcccggcgttcttcttgtgtcaataccacccgcaaccgcaggcacgccgggccaccgccattcgccatgctttcacgtaaatcaaagacttttagttcgctaatcgggttgtcagcggcaaggagttcattgagataaccccatactccggcgtgttcccgacactcctgaggcagcaccaacatcatggaaccatcatcgcggctcaacagttggctgttaaacagatatgtagacaccgcatccgacacggaaacctgagttgccggaacttctatcgccataaaaccgttcacccgcgcacgcaggtttgccagtaactgtgactggcgagcgaacgcctgttggtggcaaaacagcacctggcggttactcacggcaatcacgtcattatgaaaaacgccctggtcgataacgtccgggttttgctgggcgaaaatcacctgttggggattcacctgattcagccttgccaccgcctcgctggcttcgcgagtctgtcgcgccggataacgggaaggccgggtatcattgccctcttctcgcccgtagacaaaaagttgcatacccggttcaccgtaatgaccgccgagacgattgtggtttgccgccccctcatcaccgagcaaggctacctgcggcaacgccgaatggacactaaatttctcttcgtcgttaaannnnnnttttaacagcgattcagtgacgggcgcttccagcgaacggtgaaatttattgttcaggttagcaacggtgagatgcactttgccatccagcgtatcggcagatggcgcgatcgttgccgcattggctacccacattggcgaagcggaactgacgctggaaagccagtgcggtgcctggcgtacaaccttttccagtacctgctcatcgctaccactgaatcccaactgacgcagcaccggaataaacggacgctcgtgaggcgggatcacggcctgggggaatcccgcatcggcaagggttttcattttcagtaagccctgttttgccgccagtcgcgggttagagacctgaaaacggtgacgggtagaggctttattaccaaacgacaggcccgcgtaatgatgcgtcagccctaccagcccgtcgaaattaacttcccaggcgttcatcgcaccacctcatcggaaaaatccagcccggggttaagcgttgcgggcaaagttaacgagtccgactccaggctcgccataggccatgcgcagtaatntgcggcataccaggcgctggggcgatggttaccggatgcaccaatgccgccgaatggcgcggtactggcagcaccagtaagcggtttgttccagttaacaatccccgcccgcgcctccagcaacagttgatcgaatttttcccgctcgggggaaaccagaccgcaagagagtccgaagcgagtgttattcgccattcgaatcgcttcctcgaaagaatcataacgccagacgcgcaataacggtccgaacacctcttcatctggtacgccagcaacgcctgtcatttcaatgatccccggcgtcagcaacgatgtccctgcttgtaataagcgcggcgcaagcagggttcgtccacccatcgcttccagttgctgccaggcagtaaacacctgctgtgcggcctgttcagaaatcagcccgccaataaacggctgcggttcgtcatcccagttgcccggcgttaatcgctggctgacggcaaccagacgagcaagaaatgcatcgccctgcgccccgcttttcagcaatacacggcgggcgcaggtgcagcgttgcccggctgtaacaaacgccgactgaatggtcagatggacagccgcgtcgatatccgccacctcatcgataattagcgggttattgccgcccatctcaagggcgagaattttctccggctgaccggagagctggcgatgcagctggtagccggtattggcgctgccggtaaacagcaagccgtcgagatcctccagcgcactcagcgcctgacccgtttcacgcccgccctgcaccaggttcagcacgcctggcggcaagccagcctgctgccataaacgcattaccgcttcgccactccacggtgtcagttcgctgggtttaaagataatggtgttacctgccaacaatgcgggaacgatatgtccgttcggcaaatgaccagggaaattatacggcccaaacaccgccagcacgccgtgcgggcgatgtcgcaggctcgccgcaccgtccggcatttcactacgctgctcgccggtacgaacgtgatacgccttaattgatatcgcgattttattgatcatcgccgtcaattcggttgccgcntcccagcgcggcttgccggtttctcgggcaatgattgcggttaattcgcctttattcctttccagcaatccggcaaagcgttcgacaacggcctgacgttcagcaaatgagagccgcgcccagcgcggnaacgccgcacgggctgcccgacaagcctgcccgacctgagcggcatcggcatcattgccttgccataacacctcgcccgataccggattacgcttcacacgcgatgcaccctggcccgttatccagtcaccgttaatccataaagtcatgctgttttctcctctgcgcacaggcgcaccagacgaacgcgatcccctgcatggcatttgagggcatccagttgtgcggcggttaaaatcaaacgctcggttgccggatcggtacgcaccagcaccacgcggaaatggtgataattttcattggcgaccaggcaggccggaaaatcgccctgcgcaggctgcccttctgccacttccaccagccgacttttacggatggcgcgcacgcggtcgatgtcacactcaagcgtcggcccaccgtcgaagatgtcgatatagttgcggtagcgaaaaccttctttctccagcaccgcgcgggcaggcgcggtttgcggatgtacctgaccgatgacgtcctgggcttcctgggataaaaagtgcgtatagatcggatgtttcggcatcagttctgcaataaatgccttttgcccggtgccgcagagaaaatcggcgcggctaaaatccatcgaaaagaagcgtttaccgaggctttgccagaacggtgaatagccgtgttcgtcaatcaccccgcgcatttcagcaaccactttgtcattaaacttgtcgcgaaaagccgccataaacataaagcgcgatttcgacagcaaatagccgttgccctctttgcgccagtccgggtcgagaaacagcgtgcacagctcgctgctgccggtgtgatcgttactgagaaacaacgtcggcaatgcgttatagacattcagctcttttgaggcgtgaaccaacgtgccgacgcgatagttgtaccagggatcgttcagcccaactgccacctcaatggcgcaaatccccgccacggtgcctgtctcgctatcttccagtacaaacacataaccctgctcacttttgggcagttcaccttgccaggttttgattgccctttcgatacgcgccgaaagcgtggcttcattggcgggaagcgacgtcaggccnnnnnccgttttgctggcaagctgcatcagcgccgagacatctgagngctcaacgggacggatgaccatcatgatgaaccttggctaacaaagtgttcgcaagcaactgcaaagcgatccagtccggtcgtcacctcttcttcgctgacattgagcgcaggcgcaaaacgcaccacgttgccacccgcaatcagtaccatcacgcctgctttcgccgcttcctgagagatctgtttcgcttgcccggcgtaatcggcattcagtacacagccaatcagcaaacctaagccgcgaacttcattgaacaaaccatagcggtgattaataatattaagacgctcaacaaaccagtcgtgacgttgcttaaccccgttaagcatctctggcgtattgatgagctccagcactttgcctgccaccgccgaggccagcggattgccgccataggtggtgccatgagtgccaacggtcatcacgctggcgcactcttcggttgctaacaacgcaccgaccgggaaaccgccgcccagagctttggcggtagttaacagatcaggcgtcacgccgtagtgcatataggcatacagttccccggtgcgcccgacgccggtttgtacttcatcaaaaatcaacagcgcattgtggcgatcacacaattcacgcagaccttgtaaaaatgcgttgctggctggcaccacaccgccttcaccctggatgggttcgacaatcaccgcacaggtagagtcgtcaatcagcgcgctggcagagttaatatcgttatatgcagcatgacggatatctggtggcagtggcgcaaaatcctgtgaataggctggctgcccacccgcactaacagtaaacagcgtgcgaccatgaaacgcatttttaaacgccacgataccgctcttatggctgccgtagcggtcgtgagcgaatttacgcgccagttttagngccgcttcgttggcttccgcaccggagttacaaaagaaaacgcgatcggcaaacgtggcgtcgatcaattttttcgccagtcgcagtaccgactcgttggtgtaaccgttgccggtatgccagaacttactcgcctgttcgttcagcgcctcacgcagttccggatgcgcatggcccagcgcgttcaccgcaatgccacccgcgaagtcgatatactctttcccctgctgatcccacaagcgcgaaccttcgccacgtaccggtataaacggtgccggagcgtaaacaggtatcatccattcatcaaagttttcacgcgtaattggctgagacatagcgacctctacagtaaatagctcgttatttatatgttaataataagtaatgttttcgctgtaaatgtagattgcagggttcgtgccagccagtgataaaagtgcataaacggcggaggctaactggaaatcaaggagttataaccaaaccatatgcatttaaagtgcatattaagtgaatacgtttgcgatgtgggtgaataaaaagaataaaaaacgcaatgttatgcagaagtaaaatataattctggaattgtgatcattgacgaaatttactggaaattactgcgccattctgacgcagcgcgcaccaaaagcgggcattttttgcgccatcgttgacatcattaacaaccatcgatcaaatcacttaacaacaggcggtaagcaaagcgaaattctgctaccatccacgcactctttatctgaataaatggcagcgactatgaaatttgtctcttttaatatcaacggcctgcgcgccagaccccaccagcttgaagccatcgtcgaaaagcaccaaccggatgtgattggcctgcaggagacaaaagttcatgacgatatgtttcccctcgaagaggtggcgaagctcggctacaacgtgttttatcacgggcagaaaggccattatggcgtggcgctgctgaccaaagagacgccgattgccgtgcgtcgcggctttcccggtgacgaagaagaggcgcagcggcggattattatggcggaaatcccctcgccgctgggcaatgtcaccgtgatcaacggttacttcccgcagggtgaaagccgcgaccatccgataaaattcccggcaaaggcgcagttttatcagaatctgcaaaactacctggaaaccgaactcaagcgtgaaaatccggtgctgattatgggcgatatgaatatcagtcctggcgacctggatattggcattggcgaagagaaccgtaagcgctggctgcgtaccggaaaatgttctttccttccggaggaacgcgaatggatggagagactgatgagctggggattggttgataccttccgccatgcgaatccgcaaacagcagatcgtttctcatggtttgattaccgctcaaaaggttttgacgataaccgtggtctgcgcatcgacctgctgctcgccagccaaccgctggcagaatgttgcgtagaaaccggcatcgactatgaaatccgcagcatggaaaaaccgtccgatcacgcccccgtctgggcgaccttccgccgctaatttagcagctctcctggctcaaactgggtcaggagaattaaccttgagaaaaatcaacaaactgtcagtaatgatttgttgcctgccgtcctttgttataccgtcactgcgtttttagttgtctgaccacttctctattatcaagtttgatataggaaactccacgatgaacgctgagcgtaaatttctttttgcctgtcttatttttgcgctggccatttacgctatccacgctttcggtttattcgatctgctcaccgatttaccccacttacagacactcattcgccagagcggattgttcggttatagcctctatattctgttattcatcattgccaccctctttctgttaccaggaagcatattggtgatcgcgggaggaatagtttttggcccgttcttagggacactactctcattaattgccgccacgctggcctcctcgtgctcattcctgctggcgcgctggatgggacgtgatttactgctgaaatacgttggccatagccataccttccaggccattgaaaaaggcattgcgcgtaacggtattgattttcttattctgacccgcttaatcccgttgtttccttacaatattcaaaattacgcttacggattaaccacaatcgccttctggccttatacccttatttcggcactcacgaccctgcccggtattgttatttataccgtgatggcaagcgatctcgccaatgaaggcattacgctgcgctttattttacaactctgtctggcgggcctggcgctgtttattctcgtccagctcgcaaaactctacgcccgacacaaacatgtggatctgtctgcttcgcgccgcaacccacttactcacccaaaaaatgaaggatagaacgatgttgcaacattattcagtgtcatggaaaaaaggactgactgcactctgcttactggctgttgctgggcttagcggctgcgatcaaaaagagaatgcggcggcaaaagtggaatacgacggactttcgaacagccaaccgctgcgcgtcgatgccaataaccatacggtaaccatgctggtgcatattaatggtcgtttcctcaccgacgacactngtcacggtattgtgtttaaagatggctccaacggacataaatcgctgtttatgggttatgcgaccccgaaagcattttatgaagccctgaaagaggcaggtggtacaccgggcgaaaacatgacgatggataataaagaaacgactcatgtcacaggcagcaaactggatatttcggtcaactggcaaggggcggcaaaaacgtattccttcgatgaagtgattgttgacagtaatggcaagaaactggacatgcgctttggcggtaatttaacggcagcagaagagaagaaaacgggttgcctggtgtgtctggatagctgcccggtcggcatcgtcagcaatgcaacatacacttatggtgcggttgaaaaacgaggtgaagttaaattcaaaggcaatgcctcggttctcccggcgaataacacgctggcaacggttacctttaaaatcaccgaataaagccaggataaaggatgatgaagatgcaatcgcgtaaaatctggtactaccgtataaccctcatcatcctgttgttcgctatgctgctggcatgggcgctgcttcccggcgtccatgagtttatcaatcgcagcgttgcggcgtttgccgccgtggaccaacagggtatagaacgctttattcagtcttacggcgcactggcggcagttgtctcgttcttgttgatgattttacaggccattgctgcaccgctacctgcgtttttgatcacctttgccaatgcgtcgctgtttggcgcgttctggggcggctcgctgtcgtggaccagttcgatggccggcgcggcactgtgcttttttatcgccagagtgatgggccgcgaagtggtggaaaaattaaccggcaaaaccgtacttgacagtatggacggctttttcactcgctacggcaaacacaccatcctggtctgtcggttattgccttttgtccctttcgatccaatcagctatgctgccggtttgacttcaatacgttttcgctcgttttttatcgccaccgggcttggtcagttaccggcgactattgtttattcctgggcgggcagcatgttaacaggcggtaccttctggtttgtcaccggactgtttattctgtttgccctgaccgtggtgatttttatggcgaagaaaatatggcttgagcgccagaagangaatgcctgatgggtttaccgccgcttagcaaaattcctttcattttacgtccgcaggcgtggctgcatcntcgccattacggcgaggtgctaagccccattcgctggtgggggcggatcccgtttatcttttatctggtgtcgatgtttgttggctggctggagcgcaaacgctcaccgctcgatccggtagtacgatcgcttgtcagcgcgcgcattgcgcaaatgtgcctgtgtgagttttgtgtggatatcaccagtatgaaagtcgccgagcgcaccggcagcagcgataaactgctggcagtggctgactggcggcaaagcccgctctttagcgatgaagaacggctggcgctggagtacgccgaagccgcaagcgtaacgccgccaacggtcgatgatgccctgcgtacccgactggctgcgcattttgacgctcaggagctcaccgaactgacggcattgatcggcctgcaaaatctgtcagcccgttttaattctgccatggacattcccgctcaggggctgtgccgtattccggaaaaacgttcttaaggagagatgatgcgccattgtgggtggttgctgggattgttatcgctgttttctctggcaacacatgccagtgactggcaagaaattaaaaatgaggccaaagggcaaactgtctggtttaacgcctggggcggcgataccgcaattaaccgctatctcgactgggttagcggcgagatgaaaacccattacgctataaacctgaagattgttcgtctggcggatgccgcagacgcggtgaagcgcattcagaccgaagctgctgccggacgtaaaacgggcggctcggtggatctgctctgggtgaacggcgaaaacttccgcaccttaaaagaggccaatttactgcaaaccgactgggcagagactctgcccaactggcgctatgtcgacacacagctgccggtgcgggaagatttttcagtgcctacagaaggggctgaatcgccctgggggggcgcacaactgacatttatcgcccgccgcgatgttacgccacagccaccacaaacgccgcaagccttantggagtttgctaaagccaatcccggcacggttacctatccgcgcccaccggactttaccggcacggcgtttcttgaacagttgctgattatgctgacgcccgatcccgccgcattaannnnagcgccgaacgatgcgactttcgcccgtgtcactgctcccttgtggcaatatcttgatgcgctgcatccgtatttgtggcgcgaaggaaaggatttcccgccttcgcccgcgcggatggatgctctgctgaaagccggaacatttcgcctgtcgctgacctttaaccccgcgcatgcnnannnnnnnnnnnccagnggcgatttgcctgcaagcagttacagttttggctttcgcgaggggatgattggcaacgtgcatttcgtcaccattcctgccaacgcgaatgccagtgctgcggngaaggtagttgccaatttcttgctctcacccgatgcgcaattgcgtaaagcagatcccgctgtctggggcgatccttctgttctcgatccgcaaaaactgcctgatgggcagcgcgaaacattgcaatcaagaatgccgcaagatctgccgccggtactggctgaaccgcacgcaggttgggtaaatgcgctggaacaagaatggctacaccgttacggtacgcattaatctttttgctgtgggcgatggtggcggtgatttatgcaccgctgatcccgacagctctcacgctgatatcgcctgctttgtcgttgacacactggcaggcgttatttgccgatccacagttaccgcaggcattactggcaacgctggtgtcgacaaccatcgcggcggtcggggcgttgttgattgccctactggtgattgtggcgctgtggcctgggccgaaatggcagcgtatgtgcacccgtctgccgtggctgctcgccattccccatgtggcttttgccaccagcgcccttctgctctttgctgacggagggctgctttatgactatttcccgtatttcactccgccaatggacaaattgggtattgggctgggcttcacgctggcggtgaaagaaagcgcatttctgctgtggatcttagcagcggtattgagtgaaaaacggcttttacagcaagtcatcgtgctggattcgctgggctacagccgctggcaatgcctgaactggctgctgttgccctccgtcgcgcctgcgctggcaatggcgatgctggcgattgttgcctggtcgctgtcggtcgtagatgtggcgattattcttgggccaggtaatccaccgacgctggcagtaattagctggcagtggttaactcagggcgacgccgatcaacaaacgaaaggcgcactcgccagcctgctgctgatgttgttactcgccgcctacgttttgctgggctatctgctatggtgtacctggcggcgtactattccccgcgtagatggcgttcgtaagcctgccacgcctttattgccaggcattacgctggcgagttttttacccttgaccggtgtgctgtgtgtggttctgctggcgatcctcgcggatcagtcgacgatcaatagtgaagcgctcatcaacagcctgacaatggggctggtggcgacattcatcgctttgctcctgttactgctgtggctggaatgggggccacagcgtcgccagttgtggctatggttgccgattttattaccggcactgccgctggtggcgggccagtacacgctggcgctatggctgaacatggatggaagctggacggcggtggtctgggggcatctgctgtgggtaatgccgtggatgctgtttatcctgcaacccgcctggcagcgcattgattcacggttaattttgattgcacaaacactgggctggtcgcgggccaaaatcttcttttacgtgaaatgtccgcttatgctacgccctacgctgattgccttcgcggtgggattttcagtcagtattgcgcagtatatgccgacgctgtggctgggcgcggggcgttttccgacgctcaccactgaggcggtggcattaagcagcggcggcagcaacggtattctcgccgccctggctttatggcaactgctattaccgcttattatttttgccctgaccgcgttagtcgcaaaatgggtaggttatgtcagacaaggactccgctaatgctctgcgtgaaaaatgtttcgctacgtttaccagaaagttgcttgctgacaaacgttaactttacggtggataaaggtgacattgtcacgttaatggggccgtctggctgtggaaaatccactctgttttcatggatgattggtgcactggccggacagttttcttgtacaggtgagctatggctcaatgagcaacggattgacatgctacccaccgcacagcgtcagattggcattctttttcaggatgcactgttatttgaccagttcagtgtcgggcaaaatttactgctggcgctaccggcgacacttaaggggaatgcccgacgtaatgccgtgaatgatgcacttgagcgttcaggccttgacggagctttccatcaggatcctgctactttgtctggcggtcagcgagcgcgcgttgctctgcttcgcgcccttctcgctcagccaaaagcgttgctactggatgagccattcagccgtcttgatgtggctctgcgcgataattttcgccagtgggtgttcagcgaagttcgcgaactggcgatccccgtcgttcaggtaacgcacgatctccaggatgttcctgctgatagttctgttctggatatggcgcagtggtcagaaaattacaacaaactgcgataacgcaaagtttttctcaatgcgtcagttcagaatggcgcactcaaaactacaatgtcgggattttcgatgaaacgtgtttctcaaatgaccgcgctggcaatggctttagggctggcttgcgcttcttcgtgggccgctgaactggcgaagcctcttacacttgaccagcttcaacaacaaaatggcaaagcgatagatactcgccccagcgcgttttataacggctggccacaaaccttaaatggcccttctggtcatgaacctgccgccttaaacctctctgctagctggcttgacaaaatgagcaccgaacagctcaacgcgtggatcaagcaacataacctgaaagccgatgccccggtggcgctgtacggtaatggcaaagatgtcgacgccgtcaaaacgcgactgcaaaaagcaggttttacgcatatctccattctgagtgacgcgctaagcgaaccttcccgtctacaaaaactgccgcactttgagcagctggtttatccgcaatggctgcacgacctgcaacaaggtaaagaggttacggcgaaacctgccggtgactggaaagtcattgaagcggcctggggcgctcctaagctttaccttatcagccatattcccggtgctgactacatcgataccaacgaagtggaaagcgaaccgctgtggaacaaagtttctgatgaacaactaaaagcgatgctggcaaaacacggcattcgccatgacaccacggtcattctgtacgggcgtgacgtatacgctgcagcgcgtgtggcgcagattatgctttatgccggcgtgaaagatgtgcgcctgctggatggcggctggcaaacctggtccgacgcgggtctgcccgttgagcgcggtacgccaccgaaagtgaaagcggaaccggatttcggcgtgaagatcccggcacaaccgcagttgatgctcgatatggaacaggcccgtggactgctgcatcgccaagatgcatcgctggtgagcattcgttcgtggccagaatttatcggtacgaccagcggttacagctatattaaaccaaaaggtgaaatagccggagcacgttggggacacgctggtagcgactcgacgcatatggaagatttccataatccggatggcaccatgcgtagcgccgatgatattaccgctatgtggaaagcatggaatatcaaaccagatcagcaagtttcattctactgcggcaccggctggcgcgcgtccgaaacctttatgtacgcacgagcaatgggctggaataacgtctccgtttacgacggcggctggtacgaatggagcagcgatccaaaaaatccggtagcaaccggtgaacgcggcccggacagcagcaaataacattgcaattactgacgctggagcgacttcagcgtcagatacccactccacacccgcgtaaaggtcgtcatccagcacaacgcaccgaagatccacgcaaaccacgcaaaccatgcagggaataaacatcccagcacaaacagtaagatcgtttctgtgccttcggttaatccccccagataataaaacgatttatgcgcataaccgggattatcaatctgatatttcgccgccagcgcagcaaaagcgagaaaactgctacccgtgccgataaacgcaaacagcagccagccgcctgccagggcgttttgctgcggtgcggcgaggataaacccaaaaggtaccagcgcgtaaaaaagaaaatcgagagaaatatcaagaaagccgcccgcgtcngtaagccctctgcgccgcgccagcgcaccgtccagaccatcaagcagcctgttcaacaaaatgacgacaagcgccgccagataccagcccagcgccagaaaaggcagtgccagcacaccgatggcaaatcccactaatgttaaaccatctggcgtaatgcccggtttatcaagaacccgcacacactgatgcaacaacggtttaatccggggatgaagatggcggtctagcacaggcactccttaaatataaagcctttctgattgagcaacagtgcggatattatggcatttttcgcttatctgcccgtgtgtaatttatgaaaatgattgaagttgttgccgccatcattgaacgtgatggcaaaattttactcgcgcaacgccccgcccagagcgatcaggcgggattatgggagtttgccggtggtaaagtcgagccggatgaaagccagcagcaggcgctggtgcgtgagttaaacgaagaattgggcatcgaagcaactgtgggtgagtatgttgccagccatcagcgagaagtttcgggccggattatccatcttcatgcctggcacgtacccgacttccacgggacgttacaggcacatgaacatcaggcgctggtctggtgctcacctgaagaggcgctgcaatatccgctggctcctgctgacattccattattagaggcgtttatggctttacgcgccgccagaccagcggattagtgctaagggttttgtcatcccgctggcattgcagaagtattccttcggctttaattaccgccccttcagaataatttttatcctgataaacgcagcactgagtacagggctgcgctgactgcccgcctgaactgaccacttctggcggtacgtttacctccacgtccggaccataatgcgggttagccagtgcaattaatggaaatgctaatactacggcgaacaatgctcgactcacagggaactccttaacgttattgtctctgctactgataacggtagccgggtggcaaaactttagcgtctgagttatcgcatttggttatgagattactctcgttattaatttgctttcctgggtcatttttttcttgcttaccgtcacattcttgatggtatagtcgaaaactgcaaaagcacatgacataaacaacataagcacaatcgtattaatatataagggttttatatctatggatcagacatattctctggagtcattcctcaaccatgtccaaaagcgcgacccgaatcaaaccgagttcgcgcaagccgttcgtgaagtaatgaccacactctggccttttcttgaacaaaatccaaaatatcgccagatgtcattactggagcgtctggttgaaccggagcgcgtgatccagtttcgcgtggtatgggttgatgatcgcaatcaggtacaggtcaaccgtgcatggcgtgtgcagttcagctctgccatcggcccgtacaaaggcggtatgcgcttccatccgtcagttaacctttccattcttaaattcctcggcttcgaacaaaccttcaaaaatgccctgactactctgccgatgggcggtggtaaaggcggcagcgatttcgacccgaaagggaaaagcgaaggcgaagtgatgcgtttctgccaggcgctgatgactgaactgtatcgccacctgggcgcggataccgacgttccggcaggtgatatcggggttggtggtcgtgaagtcggctttatggcggggatgatgaaaaagctctccaacaataccgcctgcgtcttcaccggtaagggcctttcatttggcggcagtcttattcgcccggaagctaccggctacggtctggtttatttcacagaagcaatgctaaaacgccacggtatgggttttgaaggcatgcgcgtttccgtttctggctccggcaacgtcgcccagtacgctatcgaaaaagcgatggaatttggtgctcgtgtgatcactgcgtcagactccagcggcactgtagttgatgaaagcggattcacgaaagagaaactggcacgtcttatcgaaatcaaatccagccgcgatggtcgagtggcagattacgccaaagaatttggtctggtctatctcgaaggccaacagccgtggtctgtaccggttgatatcgccctgccttgcgctacccagaacgaactggatgttgacgccgcgcatcagcttatcgctaatggcgttaaagccgtcgccgaaggggcaaatatgccgaccaccatcgaagcgactgaactgttccagcaggcaggcgtactatttgcaccgggtaaagcggctaatgctggtggcgtcgctacatcgggcctggaaatggcacaaaacgctgcgcgcctgggctggaaagccgagaaagttgacgcacgtttgcatcacatcatgctggatatccaccatgcctgtgttgagcatggtggtgaaggtgagcaaaccaactacgtgcagggcgcgaacattgccggttttgtgaaggttgccgatgcgatgctggcgcagggtgtgatttaagttgtaaatgcctgatggcgntacgcttatcaggcctacaaatgggcacaattcattgcagttacgctctaatgtaggccgggcaagcgcagcgcccccggcaaaatttcaggcgtttatgagtatttaacggatgatgctccccagggaacatttcttatgggccaacggcatttcttactgtagtgctcccaaaactgcttgtcgtaacgataacaagcttcaagttcagcatccgttaactttctgcgatagcagcagatatgccagtaaagaaatcccattagactatttttttgataatcttcttcgctttcgaacaactcgtgcgcctttcgagaagcaagcattatataatgccaggccagttcttcttcaattgtcccgttttgaaaagctgtgcttgatatcgagatcatccatgataattccgccgcccatattagcttcgccgaggatttaccggagctatgattagcgcaatcagagatatagtctgagggaaaaacagcaaatttattcaacaaggcgataacctgctctggggcttcctccatgtttgctttaaaggtattggctccatggtcgccagaaagaaaatgctccattaaggcacaataactttcgctatcttcgataccccattgttcctctaaagactcgcgtcttttacttatgatatcgatcgagtcaaaaggaagcacatgatattggaaggtatctttgccaggttcaggctttcgcggccagaactccagcgtttcagaccattgcttatgatagaatcgataaggtgcgatcaattgtagcgcctgtaatttctcgatactgagcggctcaatacctttagcctgataataatgcagctgttctttttttgctttaaaaccggcccgaacaataagccccatcataattaatagataaagaaaagagcatcccgcggtaatcaggcctctttcattcaaaccgttggatgttatcgctgcgaatacaaacattacagcgacaacacatgttnaataaaacccccacttacaaagcagcatggtcttattttctttaatcatccgttcaaaattactattaaatatttcccagccattaaaagaatacttctcgctcccaggatggttttgtaataaaacttttttcatcacattccctgttattacatactttagaggcgataattttatccatgcaaaaaaaatatccaacgaattttcttgatccgctggatatttcagaatatgactcgaatagcacgaaagattcgctcgcttacgctatcgccccgcttccggcttcatctgctggcggactttttttcgcactacgtttacgcggtgcagcctttttcttatcagcactgccaccactgcccggagccacaatgccgcgaaactgccgcaccggagtacgtttggcttgatcaataagctgatatagcgtccccaccagcggctgcataaagtcctgatagcgacactgcttttcgctgatttgcgtcagcaccgattcccagtgcgcggtcatgtccggtcgcgtagccatttctggcagcgaatggaataacgcttttccggcgtcggtggagtggatatagcgcccttttttggtgaggaaaccacgcttgaacaacagttcaataatcccggcacgcgttgcttctgtccccagaccatcggtcgcacgaaggatctttttcagatctttgtcctgcacaaagcgcgcgatcccggtcatcgccgaaagcagtgttgcatcggtaaaatggcgcggcggctgggtttgccgctctaccacttcacctttttcacacagcaactcatcgcctttcgccaccacaggcaatggcgtaccgtcgttttcttcatcgcgctctttgctgcctaacagcgtgcgccagcctgcttcagcaagaaaacgcgctttagcgacaaanttgcctttggcaatgtccagttcgataacacacttgcggaacaccgcatccgggcagaactgcatcagatactgacgggaaatcaggttatagaccttcgcttcgttctccgtcaggttgatcgcagaactccgtgcggtcggaatgatggcgtggtgcgcatcgacctttttgtcatcccaacagcggttgcgtatatctggatctaccactggctgcggcaacagatctggtgcatgaacgctgatggcattcatcaccgcgtggcgtccggcaaaatgttcttctggcaaatagcgacaatcggaacgcggataagtgattagcttgtgcgtttcgtacagcttctggcagatatcaagcacgttctgcgcgctcagaccaaagcgttttgccgcttcaatctgcaacgccgaaagcgaaaacggcagcggcgcggattctgattcccgtttatcgttatagctggtgacaatagccggttgaccactaatgcggttaaccacatgctccgccagtggacgatgtaacaagcgcccttcttcatcctggtacggttcacacgcttcgctcggttgccagatagcggtaaaccgctcatcggcaggtgtcacgatatgtgctttgacttcaaagaagtctttcgccacgaagttttcaatctcttcatcgcggcgcaccaccagcccaagcacgggcgtctgcacgcgtcccacggaaagcacgccctgataaccggcattgcgaccgagaatggtatacgcacgggtcatattgatgccgtacagccagtcggcacgcgctcgcgccagcgcagaaacgcacagcggtacaaactcactgttggaacgaagacggtcgatcgcccgctcaaccgcctgcgggttcaggtcgtttatcaagcaacgctgcacctgctggcgcttttccggtgccagttgtagatagtccagcacttcatccaccagcagttgcccttcgcgatccgggtccccggcgtgaacgatttcgctggcttcatgcaggtaccgtttgatgacgttaagttgtttggtcacggagggtcggggctgtaattgccacttttccgggacaatcggcaaatccgcaagattccagcgcgcatagcggctgtcgtaggcgtctggctgcgcctgctcaagcaggtgaccgatacaccaggtcaccacctgaccattaccgcactcgataaagccatcgcctttccggtgcggtttgggcaggacatcagcaatggcgcgcgccagactcggtttttcggcaataaacaaccgcattgaattaacggatctcaaccatggcacgaccgccgcgtgctggcaccagttcgccaatcgccgtcagttcaatgccaaactcggcggctgtagctttgacctcattttcggcttccggcatgaccgccagcagcaaaccgccagaagtttgcggatcgcacagcaaatcgcgcacttcacgcggcatttcacccatcagatgaccgtagctggcaaagttacgttcggtgccgccaggcactgcacccaacttaatgtactcttcaacccccggcaatttcgggatcgcgtcatagtcaacgcgcgcctgcacacctgcgccctgacacatttcgctcaaatggcccagcaggccaaagcccgttacgtcggtcatcgcttttacgccttcaatgttggcaaaggacgcgcctgcgatgttcatccggcacatcacttccgtcgccagtccctgatgttctggtttcagcagtgattttttctcagccgtggtaagaacgccgatccccagcggtttcgtcaggaacagtttacatccggcttgtgcggtactgtttttcttcacccgctcggtcggtacgatccccgttaccgccagaccaaaaatcggctccggcgcatcgatggagtgaccgccagccagcgcaatacccgcctgacggcatgcatagcgtccaccttcggttacttcgcgggcaatttccggggaaagtttgttaatcggccagccgaggatcgcaattgccataatcggtttgccccccatcgcgaagatatcgctgatggcgttagtcgccgcaatgcggccaaaatcgaaaggattatcaacgatcggcataaagaagtcggtggtactgataacgctggtgccattgcccagatcgtacaccgccgcatcgtcgcgggtttcattacccacaagcaaattcggatcaacaaacttcgcctgctcactgtgcaggatggtttccaacacttttggggaaattttacagccgcaaccagctccgtggctgtattgggtcaaacgaatcgagttctcgctcatggacatctcctgtcaatgcaatccgggtatggtaaccctcattccgtgaagtgataagtgagagtgtctgaattcctgcgcctttgctcacaatccagacagtttcgcgacaattatcagaaataagtgacaaacggcgtcgggtccgggacgtttatcgacgtagatgctttcagctgcggcgtgccgaggtagagaaaaccgacaattttatcctgctcacggcaaccgaatgcttcacgcactaccggactttcagttaatgcgccactgcgccagatgccgccaaacccctgggcaacggctgccatttgcatcgccatgaccgcgcatccggcagacatttcctgttcccatcgcgggactttatgattttcttcgcatttcgccaccaccgtgatgatgagcggtgcgcggaacggcgcattacgggctttgtcgatagctttgtcatcactaccggcagcaatcgccccctgttccagtacggcgctgaaacgctcgcgcccttccccttcaatcacaaaaaaatgccacggttgcatggacttatggtccggcgcgcgcatacccgcacgcaggatgttttgcagttgttcacccgttggtgcgggttcagccaggcgggaggcgctacggcgattgatcaatagttcgagtgcatccatttgattaactcctgtcgtgatatttattcacaaaattaacacgagagtggattttgttacagcacagtccgcaattcctgctgacaagtgccggttgggtcattacgataaccacatctattgcgcctgtgacaggtgtgaccttaagttgggagaatacatgcgaaccctttggcgatttattgccggattttttaaatggacgtggcgtctnctgaatttcgtccgtgaaatggtacttaacctgttctttatttttctcgtgctggttggtgtggggatctggatgcaggtcagtggtggtgattcgaaagaaacggccagtcgtggtgcactgctgctggacatttctggtgtgatcgtcgataaacccgacagttctcagcggtttagtaaattaagccgccaactacttggtgccagttccgatcgtctgcaggaaaactcactgtttgatatcgtcaataccattcgccaggcgaaggatgaccgcaatatcaccggtatcgtgatggatctgaaaaacttcgcaggcggcgaccaaccgtctatgcagtacatcggcaaagccctgaaagagtttcgtgacagcgggaaaccggtttatgccgttggcgagaactacagccaggggcaatattatctcgccagtttcgccaataaaatttggctgtcaccgcaaggcgtggtggatttgcacggttttgctaccaacggtctgtactacaaatcgttgctggataagctgaaagtttccacccatgtgttccgcgtgggtacgtataaatctgccgttgaaccgtttattcgtgatgacatgtcaccggcagcccgcgaagctgacagccgctggattggtgagctgtggcaaaactatctgaatactgttgccgctaaccggcagatccctgctcagcaggtattccctggcgcgcaagggttgcttgagggtttaaccaaaaccggtggcgataccgcgaaatatgcactggaaaacaagctggtcgatgcactggcatcgagtgcggaaatcgaaaaagcactgaccaaagagttcggctggagtaagactgataaaaattatcgcgccatcagttattacgattacgcattgaaaacgccggcagataccggtgacagcatcggtgtcgtcttcgctaatggcgcaattatggatggcgaggaaactcaggggaatgttggcggtgataccactgcggcacaaatccgcgacgctcgccttgacccgaaagtgaaagcgattgtcctgcgtgttaatagcccaggcggcagcgttaccgcgtctgaagtgattcgcgctgaactggcagcagcccgggcagcgggtaagcctgtggttgtatcgatgggcggcatggcggcatctggtggttactggatttccacgccagctaattacattgtggctaaccccagcaccctgaccggttctattggtatcttcggcgtgatcaccaccgtanaaaatagtctggattcgattggtgttcatactgatggtgtctcaacttcaccgctggcggatgtttctatcaccagggcactgccgccggaagcgcagcagatgatgcagttaagcattaagaatggctataaacgctttatcacgctggttgctgatgcgcgtcattcgacgccggagcagattgataaaatcgcccagggccacgtctggaccggtcaggacgcaaaagctaacgggctggtcgatagtctcggggatttcgatgatgcggtcgccaaagcagcagagctggcaaaagtgaaacagtggcatctggaatactacgttgatgaaccgaccttcttcgacaaagtgatggacaacatgtctggttctgtccgggcaatgttgccagatgcgttccaggccatgttacctgcaccgctggcctcggtagcntctaccgttaaaagtgaaagcgacaagctggcggcgtttaacgacccacaaaaccgttatgcgttttgcctgacctgcgccaacgtgcgttaaatcctgcaaaaatgtggccgatatgctgtcggccacactcctgaatcggactgtctttcactccctctctccactacattcccttgctcatttagcatctgatatggagtcatcagtgaacaaggccccctctttaattgccgctatcgtcctcggactggggattagcgcctgtggttattttgttggcgatggtgttaaacatttaaaaaccaacaaccgttatgtcaatgtgcgcgggctttctgaaaaagaagttcgcgcagatacggcggaattaacaattgcgattaactttaagggtaatgttcccggcgaactgttcccgaaactggaagaagcgcagaaaaaaattgttgccgaactcaatgctcaggggattaacgagaaagagataattctgggccaatggacaagcaagcgaacagattccttttatctgaaagatgatcccacaatgccacgctataacgcagacgggtcagtgacgataaaaacccataatgttgctgctgtcgaaaaagtcgtcgcgaaattaaacgaactgcaagtcgctacggatggcgctatcgctgagagcaaagtcgcctatcgctttaatggtattggcgcactgcgcgctgagatgattgctgccgccaccaaagatgcacgcaacgccgcactacaatttgcaacggactcaggtagccaggtggggtcaattagcgatgcctcacaaggcgtattccagatctttgccagtggcagtgatgaagatgatcctacggcgattaataaaacggtacgcgtagtcacgaccgtaacctatgcgttgcaggattaaccacttttctccggcgggacactaatccctccgtcctgccggacttttctcatatccacagagtatccaggtgcgctcgctgcccctcacgtatatacttttgctctttcgatatcattcatatcaatatcatgcaaaagaaatcaatttacgttgcctacacgggcgggaccatcgggatgcagcgttccgagcagggttatataccggtgtcaggtcatctacaacgccaactggcgctgatgccggaattccatcgcccggagatgccagatttcaccattcatgaatatacgccgctgatggattcttcagatatgacgccggaagactggcagcatattgctgaagatattaaagcgcactatgacgactatgatggttttgtcattctgcacggcaccgacacgatggcgtataccgcctctgcgctgtcgttcatgctcgaaaatctcggtaaaccggtcattgtgacagggtcacaaatcccgctggctgagttacgctctgacggacaaattaatctgctgaatgcgttgtacgttgcggcgaattatccgatcaacgaagtaacactcttttttaataaccgactgtatcgcggcaaccgcantaccaaagcccatgccgatggttttgatgngtttgcctctccaaaccttcctccgttactggaagcaggtatccatattngtcgtttgaatacgccacccgccccgcacggtgaaggggaattgatcgtacatccaatcaccccacaaccaattggcgtagtgacgatttatccagggatttctgctgacgtcgtgcgcaattttctgcgccaaccggtgaaagcattgattctgcgctcctatggcgtgggtaatgcgccacaaaacaaagccttcctgcaggaattacaagaagccagcgatcgcggtattgtggtggtcaacctgacacaatgtatgtccggtaaagtgaatatgggtggttatgccaccggtaacgccctcgcccatgctggcgttattggcggtgcagatatgactgtagaagccacgctaaccaaactgcattacctgcttagccaggaactggatactgaaaccattcgcaaggccatgagccaaaacctgcgcggcgaactgacgccggatgattaaggagactgcaatgccccctcgcgccctgttactggtcgatttacaaaatgatttctgtgctggtggcgcgctcgccgtgccggaaggtgacagtacggtggatgccgctaaccgcctgattgactggtgccagtcgcgcggtgaagcggttatcgccagtcaggactggcacccggcgaatcacggcagttttgccagccagcacggtgtagagccttatacgccaggccaactcgacggtttgccacaaaccttctggccagatcactgtgtgcagaacagtgaaggcgcacaattacatccgttactgaaccaaaaagcgatcgcagcggtgttccataaaggcgaaaatcctttagttgacagttacagtgccttttttgataacggccgtcggcagaaaacctctctcgatgactggttacgcgatcatgaaatcgatgaattgatcgttatgggcctggctactgactattgcgtgaagtttaccgtgctggacgcgttacagttaggttataaggtaaacgtgattaccgatggttgtcgtggcgtgaatatccagccccaggacagtgcgcacgcgtttatggagatgtcagcagctggggcaacgctatatacgctggcagactgggaagagacgcaggggtaattttacgctggcctacaattctgtactggcattgtaggccaaataaaacacgtcagtggcacatctggcaattgatgccatcaacgaaagatttaatttacctcagaaatctcttccaacgacaccttccgcgtttcgatgccaaaaatggagagaaccagcgcacagagcaataacatgacaccaagtaccataaacaccgtgatcgacccataatgtgttaataatgccgcaacgccatagggcgtgaagactgcgacgatccgtccgacggcattaacgaaacccgaaccgcgcaggcgtaaatgcgttggccaaagctccgggatataaaccgccgacgcgaagcaaacatacatgtataaaaagaagatcatcaccaggccatagattaaaatcgcccactctgtagtctgaattgaatagatatagcctaacactgcaataataataagtaaggtggagccaaataaccgacgaggaaaatgatcaataattaatgccgcaataaatattcctaccggagcgccaatcataataacagcggtcattaatattgatttatcgacatcaatgccggagttaacaaatatggtcggtatccatacggtgatggtataaagcgaaatgttcattgcaattaaaacagtaatcgcgactaatgtacgtcgtaacatttcacctttaaacaggagccagaaagtacccttgattactttaaccttgctgttgctctgatacgaagtaagcgggggtaaacgaatactcttctctctttcaatttgctgctctacttcacgaagttggcattctgcacctgcgatttgccctttccctgccagccatcgtggcgactcaataaagtatttacctgagagaaaccaggctaacagtatgccaataccacccaacagaaacattatccgccaactaaaaaaagcgataaccaccacacctatcgccgcagacagcatgggcgaccagttaccaacaaatgagnnnnnngcggaccattttccacgcaccgtcgcggggataaantccgtaaatgaggcatagccaaccataatcagcgcccccattcctgttcccatcaggaagcgaaagaagataagccagtacatatcagggacaaaagcggcccctgttgcagcaataccgacgatgagaagatttatgcgaaacgccctgcgccgcccaaagtaatcaccgatgaacccaccggtaagagagccgatgaaataaccaaacattaatgccgaggtaaaggcggcattgaggaaattatttgaccatccattgcttaccagctttgctaagacgacattaccggagtaactcaaaaaccctgttaataacagactaaagcttataataccanntannnnnnnatgaaaccgggccaaaggcaagcggtccagtcttgcgccaatttgatcatattgttccattgggtgcctcggatttgctaaaaaaggtagcaattgcgnnaaattcacttnnnnnnnnnnnnnnnnnnnnnnnnnnnnnnnnnnnnnnnnnnnnnnnnnnnnnnnnnnnnnnnnnnnnnnnnnnnnnnnnnnnnnnnnnnnnnnnnnnnnnnnnnnnnnnnnnnnnnnnnnnnnnnnnnnnnttaanaacagactaaagcttataataccaaatatacgataannaaaccgggccaaaggcaagcggtccagtcnngcgccaatttgatcatattgttccattgggtgnnnnnnnnnnnnnnnnnnnnnnnnnnnnnnnnnnnnanncacttgccgcatctttatcatcattttatttccaggcgcaggaacaaataatattgacaacgcgtgcttaaattaccacaccagctggatattattgtctttgcaaaatgctatccactctgcacccggtgatttatcagttattatgtaattaatatgactaaagtcggctaactggacaaaagctttgcgatcaaacttagagtgatcaaccaataacgcaacttctgtcgcctgacggatcattgtctttttgatttcagcttccgcttcattagagtccagcgcgccgctgttaatatcaagacctttacaactcattaccatgatatcgacatgatagcggctgatgatctctttagtaattcttccttgcagtgaaagtgtatttttgtttagttccccacccgttgaaacgactttaatttctgactgagccagaacatgaatcgcttccgccgagttggttagcaacgtcaggtcactacggtcctgtaacaatttgagcaattccattacggtactactggaatcggctgccatggtggttttattgtcgataaagggtagtgccttgcgtgcaataagctgcttctcttcataaaacgatgannnnnncttataaaaatggatattctccgtcaacatcgctgtatttaaaacagcaccaccataggttctggtcaaaaagccttcatcttccagcttctcaagatcgcggcgaatggtttcttcggttacctgaaaaatcccactcaaatttgagactgtcacctttttatcgttggcaaccatttgcttaattgcctgaatcctgtcttttgccgccacgattacacccctgtatctttttacatcacattagcgcgattatcgcataaccgatgtttactttcaaaataacctgtttgaatcacagattttcatcacagttttcacagaaacagaggtgaatcgtgttgagtatttaacgccccaaggcctctgccatttccctcatcaatgttgcgtctgcatccgataagttgatattcagtgccgcgacattttcgcgtacctgttccggtgcagtagccccactaagaatggagattaaatcactctgttttaatatccacgccagtgccagagtgggaattgtgcactgataacgagcacaaagtggctgccactgttcaagcatatcaatcactttcagcatgttttcacgctggaaccagactttatttgcccgagcgccgcccggaacgtaatcacgagtgatggtgccggtcaacaatccctgctctagcggggaataaacctgaaccacaatgccattatcacgacatagcggcagcagttcgttttccattgcccggtcgaggatactgtatttcgcctgaataatatccagttcaccatattgcagatactcgcggatatggtcagcatcgacgttagcagcgcctatagcgcgaattttcccttcagcctttaactcattaagcactgcgacagtttcagcgatcggcgtataaaatggcggcaccgactgccagtgcgtcatgtagatatcgatgtaatcaaaacccagacgttgcaagctggcttctacctcttcgcggatagattccggggaaaggtttttatacaactgccgatcgccaactttgttgaataaacttccttttcgttcccagacaatgccgcatttggtttctactacaacctgttcacggggcagtttttttaacgcctgaccgacgataacttcactattgccaaagttatatcctggtgcagtatcaatcaggttaatgccgcaacgatgggcttcaagaatcgtatcaatacatatttgccgatcgagatcgccattccatgcaggaccgccgccaatggcccatgtccccaaccccattcgcgaaagcgtaatatccgttgtgcctaaaggtatctttttcatttgccttcattatccttcgtattcttccagcaattgttcgaccagctttctgttttttacgccggtggtggcaccgacgcttagaaccgagatagccgccgttgcattggcaaagcgtgcgcattcacgcagattttttccttctaacagtgccgcaataaaacctgaagcaaagttatcgcccgcgccaatggtgtcgatggcggttattcctgcgaccgccggcaccttcatcgtcatgtcaccacgcttgataaagcagccgtctttacccgttttaatcaccaccgtttttacgccgcacgcatgaaagctgtcagcaatttcatccagtgtctctttcccggtgagtaattttgcctcggcataattgacataactcaatgcttcgcaaatatcatccagcgtttcattcaaccgcggtttaatcatatcggcacagataatcatctgccgggctttagcttgcgtaaaaatttctgttagcgctttaccatccaatagtggactgttgaaaatactggccagtgataataatttcgcctgggaaaaccgcgcaaaatcaacatcgtcaatattcaatttccacagactgccgttacggtttgtgacaaacgtccgctcgccatcctccgtcaccagtccaacattaatagaggtatctatgttgacgtcctgcttcaggctttgaatatcaatattctctttgcggcaatggtcgagaataaactgccctgcggcatctttaccaatacggctcattaatgctgtacgatggcccagacgagaaataattgttgcttcatttattgcatcacccccggtggtcattgcgattctttcaagaggataagaatccacatcaaagatatttttactgaccggttgcaatggaatatcaacaatagcggcacctatacaaataacgtcgagattatccatatcattattccgctttgccatcagaaccgaacagtttaattttttccaatgcccgttcttttacagctttacgtacttcacgttctaaatgcaggaaaggctgatcctggttttctttcactgcgaccattgcggcctgacagagctccgtatggatgttgattttcgcgatacccaacgaaattgcagttttaatgtcggcatcactgatccccgatgcgccatgcaaaaccagcggaacagacactgcatcgcgtacgcgtttgacgacctcaaagttcaattgtggctctgacgtataaaccccatgctggttgccgatggcgacagccaatgagtcacagcccgtacgttcaacaaattcagccgcctggtcaggatcggtatagtgatagcccgccagcgcttcctcataaacggtttcattaccgacatgccctaattccgcctctaccggaatacccagcggatggaagaaatcaacagcctctttggttaaacgaatattttcttcgaaatcaaatgcggaagcatcacgcattaatgaattcataccatgagtccaggcgttatgaataatctccatactccgaccatgatcccaatgagttattaccggcaccgttgctttttgtgccatagataccatcatgtgagagaaatcttcaaatgaggtgttgccgacaaaacctgtgccaaaagaaataataaccggtgatttcgcttcttcggctgcgtcgataacgcccatcaacatttctgcattccatacattaaaatgggcaatagcataacgtttatttgtggcatcgttttcccaatatctgatatctgcgagcatgttctgttctcccgtattaattaatcgctaatcttaataacgcctttaataatgtcgcgtttgttgttaactgactcttcaaatgcctgttgtacatcccgataatcgtaaatatgcgtcaccatcgatttcacatcgaatcgccctgaagaaattgcttcaatcgtgaccggataacgattggcatagcggaataccgtctggatagtgacttcgcgattgattttgaggaaattgattgccgaagcgccgggtacagtaccaacaatcataattttaccgccacgcattaccagataaggtgcctgtttaacggtgaccgcagaacccgctgtttcgaaaacaatatctgcgcccatgtcttcggtaaattgctgacagcgtgcaatagtgtcttcttttgcgccgttaataaccactgtcgcaccaagctgttccgccattgccagacgtttttccagcacatcaacgacggcaatttccgttgctcccaggcatttgcacgcttgcaacgtcatcaaaccaatacaacctgctcccagaataattatnttcttacccggtttaacatctgccagcatcgcggcatgcatcccgactgcggcaggctccaccagcgtcccttccatcgtgtccatattgtcgggcagtttgtaagtaaagctctccggatgacacagatagtgcgttaatgcgccgcggtagttgggttgtgtcgccataaaatcaacgtccgggcagatgttatatttgccttccagacagtaacgacagtgaccgcaaggaacgccaggttcgatatttacccgatcccccggtttaaatttgcgcacacggcttcccacagccacaaccgtcccggcgcattcatgacccaggccaatttcttgatttgggtctttaggcggaataaacggacctgattcaaaaccatgtacatctgaaccacaaataccgacatattctactttaatcaaaacttcatcttctttaggcactggtatttctgctgaaanaattttcattgtgcccggcacctgcaatattgcttttgaatttttcattttgaatccacccgtattatttattggctactgcatcaatacttaaactttcaacggagacacctttggtttcgattccaatggtggcgatagcaattgcgacaataattgaaaccgcccccagaagaataaagactcccgtaacgccataactactgagcagcactgcaacggcataaggtgcggcaataccactgattcgccctaccgcattcgccagaccggagccacggagtttggcctctgtcggccagatctcagggacatacactgccgaggcatagcaaacgtacatatagacgaaagtaatcaggaagaaaccaatcaacgttatgagcaacatgctggtttgcagtgaatagatatatccgagcaccgcaatcaggattaatagccccacacccattgttttacgcggaattttatccatcaccagcatggcaatannaatgnnnnnngnngcgccaaacatactcatggtatttaaaacaatcgagtcttttaaattaatcccctgggtcatgaatatgcgacgatggcaaacattgatgaatgccagcggcaatccggtaagcgatccagccgtgcaccacaatgcggttttgttatctgatccatgcgataacgttccttcaggagagtggttattcatcaaagtcgtaagtcatgatcactttgattgcggttttatcgaccatcgcatcaaacccttcgcgccattgcgacaggccgatacgatgcgtgatcatcggtttgactttgatagcgccgctggctaatagcctgatagcgttacgccatgaggtggagtcataggccatatgcccaatgatgcttttgtnnnnngcggtaatgtcattaatcgagaaatcaagaggtttgaagcccattccaacgcgtaccacttccccgttcggacggagcatttcgatggcttgtttcagtgcgatattggcaccggagcattcaatcaccagtcccagattgtctttgccacaaatttgnnggcagcgcgccaccacatcttcggtagaaccatttactactgccgtcgcacccagttcttttgcaaccgggaagcggaccgccacatcttcttgcagaccaacgacgacgatatttaccgcccccataattcgcgccatttgtacggagaacagcccgagtgggccagtgccgatgacgaccacatcctgaccagggaggaatttcgattgctgcgcgatggatttgtaggcattacagatagggtcaagtacggctgcgtcctcataatcaacaccatcagggatttcccacaacgcatgacgatgaattttgagaatttcaccaggaaccagacaatatttggaaaaaccaccgccccaggtattgttatccagaccaaggtttactttttctgtacaacacagaaaatcaccttgttcacaggccggacaaacgccgcagacgtgaccgctgttatccgacacgacgcgttgccccactttccagtctttgactttttcaccaacctgcgcaatacaacctgcgaactcatggccgcggatagagttaaactcatcagaaccgctatcgacattgtagtgcttcatgtctgcgccgcagattgccgcggctttaatttcaatcactacatcttccgggccacaaatgggttgtggcacatcgatcatcttgtagccgccaaaggctttgccaaaccgagccagtgctttcattgcgtcatcctctgtgttttgttttgcttagatggtcatcatacttacccacatgatttttgaggtcaacattaaatatgtaaaacacagataataatctgcgctttacaactcagatcacaattacgcagaaaatggctggttctgttacaggttgatggnaggcggaacgcaaaaggagcaaatttgagagggattaccggccaaataggtctgagacttaagttcaggagaagtcattcaggcgtgaacgcgacggcaagagatcggactgggacttagccaggtcatggcgagataattgagatgagtcgtggggtcattgttggctatccccttcatagccgcnnnnaaaaggggatgaaccacttacttaaacatggcaataggctttgctgagataccaaaatcttcttttaactgctgtttgctcttcatgaccatctgaccatttgtgtcaattgtcatatgctgtgcttcggtattattgcgggcttgccacagcatcaccagttgcaggcagttctctttttgttcctcggtcaacgcaacgccatcaggccatttccccagttcaacggcggtcgacaaacgctggtatacctcaggcgtcatgctgttgataatgtcatcaagattcataatttttccgctcctgtggaataagttgctgaatcgttttttcaaccgttgatttcttcgccgttttcaccatcagtgaagcgtaaagaagcagagttaacacaataacgttcgcccgttggctgcggcccgtcagggaagacatgccccagatgggcatcacagttaccgcaacgaatttctatgcgctgcattccatgtgacaagtctttgatataacgaatggattcttcactcaccggttcgtagaaactgggccagccacagccggaatcatacttggtttgggaatgaaacagcggggcatcgcagatcaaacagtgatatacgccgtcacgcttgttatgcagtaaacgacccgtaaatggcggctctgtcccatgattctgcgtcacgtaaaactgcatctcggacaaattttttttcagttcttctgccgaaggtttattagccatttgctcacatctcactttaatcgtgctcacattacgtgactgattctaacaaaacattaacaccaactggcaaaattttgtcctaaacttgatctcgacgaaatggctgcacctaaatcgtgatgaaaatcacatttttatcgtaattgccctttaaaattcggggcgccgaccccatgtggtctcaagcccaaaggaagagtgaggcgagtcagtcgcgtaatgcttaggcacaggattgatttgtcgcaatgattgacacgattccgcttgacgctgcgtaaggtttttgtaattttacaggcaaccttttattcactaacaaatagctggtggaatatatgactatcaaagtaggtatcaacggttttggccgtatcggtcgcattgttttccgtgctgctcagaaacgttctgacatcgagatcgttgcaatcaacgacctgttagacgctgattacatggcatacatgctgaaatatgactccactcacggccgtttcgacggtaccgttgaagtgaaagacggtcatctgatcgttaacggtaaaaaaatccgtgttaccgctgaacgtgatccggctaacctgaaatgggacgaagttggtgttgacgttgtcgctgaagcaactggtctgttcctgactgacgaaactgctcgtaaacacatcaccgctggtgcgaagaaagtggttatgactggtccgtctaaagacaacactccgatgttcgttaaaggcgctaacttcgacaaatatgctggccaggacatcgtttccaacgcttcctgcaccaccaactgcctggctccgctggctaaagttatcaacgataacttcggcatcatcgaaggtctgatgaccaccgttcacgctactaccgctactcagaaaaccgttgatggcccgtctcacaaagactggcgnnnnnnccgcggcgcttcccagaacatcatcccgtcctctaccggtgctgctaaagctgtaggtaaagtactgccagaactgaatggcaaactgactggtatggcgttccgcgttccgaccccgaacgtatccgtagttgacctgaccgttcgtctggaaaaagctgcaacttacgagcagatcaaagctgccgttaaagctgctgctgaaggcgaaatgaaaggcgttctgggctacaccgaagatgacgtagtatctaccgatttcaacggcgaagtttgcacttccgtgttcgatgctaaagctggtatcgctctgaacgacaacttcgtgaaactggtatcctggtacgacaacgaaaccggttactccaacaaagttctggacctgatcgctcacatctctaaataagttgagatgacactgtgatntaaaaagagcgacttcggtcgctcttttttttacctgataaaatgaagttaaangactgcgtcatgattaagaaaatttttgcccttccggtcatcgaacaaatctcccctgtcctctcccgtcgtaaactggatgaactggacctcattgtagtcgatcatccccaggtaaaagcctcttttgcattacagggcgcacaccttctctcgtggaaacctgcaggtgaagaagaagttctgtggttgagcaacaacacaccgttcaanaatggcgttgctattcgcggtggcgtaccggtttgctggccgtggtttggtccggcggcacaacaaggcctgcctgcgcacggttttgcccgcaacctgccgtggacgctgaaatcacatcgtgaagatgctaatggcgtagcgctgacttttgaattgacacaaagcgaagagacgaaaaaattctggctgcacgactttactctgttagcgcatttccgcgtggataaaaactgtgaaatcgatcttgaagcacacggcgaatttgaaaccacctctgccctgcatacctactttaacgtgggtgatatcgctaaggtaagcgtcagtgggctgggcgatcgcttcattgataaagtaaatgacgcgaaagaagatgtactgaccgacggtattcagaccttccctgaccgtaccgatcgcgtgtatctgaatccgcaagattgcagcgtgattaatgatgaagcgctgaatcgtattatcgccgtaggccaccagcatcatctgaacgttgtaggctggaacccgggaccggcgctttcagttagcatgggcgacatgccggacgatggctacaagacctttgtttgtgtagaaacagcttacgcctcagaaatgcaaaaagtgaccaaagaaaaacctgcacatctggcgcaatccattcgcgttgccaaacgttaatttgcgtcaatgttgtgtgccgggtgcgatgcatccggcacgtatcaacatcacaccatatccagcgcagtttttccttttggtgccggatacgctttgtccagcatggctaattccgctgacgaaagttcgacctcaagcacagccgcattctgttggacatgggcaatcgtggccgcttttggaatcgccatcacaccctgatggctgattacccacgccaacaatacttgcgccgcgctgatattgtgagcatgtgcaatttcgttgactaccgcgttttttaacagtccattgcgcaaccgcccggcctgggctaacggactgtaagccatcaccggcatctgctgttgctggcaccaggggagtagatcgtactcaatccctcgtgaaccgagatggtaaagcacctgattagtggcacactgatttccccccggcagctgccagagttcctgcatatcagcataatcaaggttcgaaacgccccagcggcggatttttccctgggcgatcaatttttccatcactgcaacagtctcttcaaaagcgaaactgccagaccagtgtaataagtagagatcgagataatcagtattgagacggcgtaaactggcttcgcatgcatttatcgctttttgcccgccagcattccacggatagactttagagacgagaaagaccttctctcgcagaccggttaatgcttccccaaccaccttttcggcaccgccatcggcatacatttcggcggtatcaatgagggttaaaccgagttcaatgcccgcgcgtagtgcagcaacttctgttttgcgctgactggcatcttcgcccatataccatgttccctgccctatggctggcagtgagacatcgccactaaattgaatcattttttgttgcattgtttcctcccaggtattgcaccaccgtaatgcaaaacagggcgtgacgccctgtttttatgcacaaaatgccctggaaagatgcattatcagaatttgtaggtgatcccggtagaaatcaggccagtccaggatttatccaccatcgggctgtcagtaacttcatcagacagacgggtgtagcgcgcggtaccgtaaacactccagtcgccgaggaagttgtagctggcgctcagctccaggtaagggctccagctgtcgttcgggttatagccacgcagaccgctgcgagcggactctttgcgcgatacgccataatagtattcgttctggttttcgctgttccactgcacaccaatacccggagtcacggtcaggccaccgttggtgtaacgatacaaccaggccatatcccagacgatgccgttgctgttatccagggtatcgccagccagggtggtacgcaggtaaccgtactgggtaaagtgagcataagacagaccagccatcatggtgctcttacggtcatccaggtgacgcatttggtgatcgccactgtctttagctttgaagtaaagcggcgaccagtaagcggtaattgaaagtttatccgttgcgtcattccacaggtagtaaccaccacctaagccacggaaccagaagttatcgccttcatagttgattaccggtactgggtaaacatcggtatcgtaatctttatatgggtgttcaacgacacctacgcctgcgcccagggaaaatttaccttcagcgtgcgctacgcctgcagacgttgcgataagcactccaagtgccagaagtttgagtttggtcacaattaatcattccttaaacaaatgtttagcgggcgacaaagtttacccgtcaatacatcgaaacccaacctttttacgttttcattttttaaagtaactgtttaattttcctgacgcggatgacaccgcgcttacagccaaatgaatttagcgttactggcgagcctggtctttacattaattatgcaaaatttatggatgagttgttgatatgccattgaaattaagaaagccgtgtaggcaagttttccatttgccatctacgcttaattttgaaggtgtatcaccgggcacgttgttctcatcgtcgataaaatggcatgagagttgctgtgttttagcaagagacgtcgttcagtttacctcttccgggagcctctactattcatatgaacggctcttaacctgtgctaaaaaacgaaaggacggcataccatgaatatattcgatcactatcgccagcgatatgaagctgccaaggacgaagagttcacactgcaggagtttcttaccacttgtcggcaagatcgcagtgcttatgccaacgcggctgagcggctattgatggctatcggtgagcctgtcatggtcgatacagcccaagaacccagactttctcgactcttttctaaccgggtcattgcacgttatccggcgtttgaagagttttacggcatggaagacgcgattgaacagattgtctcttatctgaaacacgcggctcaggggctggaagagaagaaacaaatcctgtatctgctggggcctgtgggtgggggtaaatcatcgcttgctgagcgactgaaatcattaatgcagctcgtaccgatttatgtattgagcgccaacggtgagcgtagcccggtcaacgatcatccgttctgtcttttcaatccgcaggaagatgcgcagattctggaaaaagagtatggcattcctcgccgttatctcggcaccatcatgtcgccgtgggcggcaaaacgcctgcatgaatttggtggcgatatcactaagttccgggtagtgaaggtctggccgtcaattctgcaacaaattgctatcgccaaaacggaacccggtgatgagaacaaccaggacatctccgcgctggttgggaaagtcgatattcgtaaactcgaacattacgcgcagaatgacccggacgcctacggctattccggtgcgctgtgccgcgccaaccaagggatcatggaatttgtcgagatgtttaaagcaccgataaaagtgctgcatcccttgttaaccgccactcaggaaggtaactacaacgggacggaaggtatctccgccctgccgttcaacgggattattcttgcccactcgaacgagtccgaatgggtcactttccgtaataacaaaaacaacgaagccttcctcgatcgtgtttacatcgtgaaggtgccgtattgcttgcgcatttccgaagagatcaaaatctacgagaaattgcttaatcacagtgaattgactcacgccccatgcgcccctggcactctcgaaacactgtcacgtttttccattctttcgcgcctgaaagagccagaaaactccagcatttattcaaagatgcgggtttatgatggcgaaagtctgaaagacaccgatcccaaagccaagtcgtatcaggaatatcgtgactacgccggtgtcgatgaaggtatgaacggtctgtcgacgcgttttgcgtttaagatcctctcccgcgtgttcaacttcgatcatgtagaagtggcggcaaacccggtccatctgttctacgtcctggaacagcagatcgagcgcgagcagttcccacaagagcaggcagaacgctatctggagttcctgaaaggttatctgatcccgaaatatgccgagtttattggcaaagagatccagacggcctaccttgaatcctattccgaatatgggcaaaacattttcgaccgttatgttacctacgcggatttctggattcaggatcaggagtatcgcgatccggataccgggcagctgtttgaccgcgagtctcttaacgccgagctggagaaaatcgagaaaccggcggggatcagtaatccaaaagatttccgcaacgagattgttaacttcgtactgcgcgccagagccaataacagcggacgcaatccgaactggaccagctatgaaaaactgcgcacggttatcgagaagaaaatgttctccaataccgaggagctgttgccggttatctcgtttaacgccaaaacgtcaaccgacgagcagaagaaacacgacgactttgtcgaccgtatgatggaaaaaggctacacccgtaaacaggtgcgtttactgtgcgaatggtatttgcgcgtacgtaaatcgtcttaacaaccctggcccggtacacatgctaccgggcctacaacgacagcgaaccgtgggccanagaaatggcaacacaggcgtagcatacagttggcaaatgtagtacggggggcatatgacctggtttattgaccggcgtctgaacggcaaaaacaaaagcatggtgaatcgccagcgttttttacgccgttataaagcgcaaattaaacagtcgatctccgaggccattaataagcgttcggtgactgacgtcgacagcggcgagtccgtatccattcccacggaagatattagcgaaccaatgtttcatcaggggcgtggcggtctgcgccaccgcgtgcatccgggcaatgaccatttcgttcagaacgaccgaattgaacgtccccagggtggcggcggaggttccggcagtggtcagggccaggccagccaggatggtgaaggtcaggatgaatttgtctttcagatttcgaaagatgagtatcttgatctgctctttgaaaatttggccttaccgaatctgaaacaaaaccaacaacgccagctgaccgaatataaaacgcatcgggcgggttataccgctaacggcgttccggccaatatcagcgttgtgcgttccttgcagaactcactggcgcgacgcacagccatgacggcnnnnaagcggcgggaacttcatgcactggaagagaatttggccatcatcagcaacagtgaacctgcgcagctgctggaagaggaacgtctgcgcaaagaaattgcagaattacgtgccaaaattgaacgcgtcccttttattgacaccttcgatttacgttacaagaactacgagaagcggcccgatccctccagccaggcagtgatgttttgcctgatggacgtttccggttcaatggatcaatccactaaagatatggctaagcgtttttatattctgctgtatctgttcctcagcagaacgtataagaacgtggaagtcgtatacatccgccatcatacccaggcgaaagaagtcaatgaacatgagtttttctactcgcaggaaactggcggcaccattgtttccagcgccctgaaactgatggatgaggtagtgaaagagcgttataacccggcacagtggaatatttacgctgcacaagcatcggacggcgataactgggccgatgactctccgctttgccatgaaattctggcgaaaaaattattacccgttgttcgttattacagctatatcgaaattacccgtcgcgcgcatcagacactgtggcgagaatatgagcatctgcaatctactttcgacaactttgcgatgcagcatatccgcgaccaggatgatatttatccggtgttccgtgaactgtttcataagcaaaatgcaacagctaaagactaaaactatcagccgggtcattatcgcctggctgatttttagctcactgtaaattatctcatttattacatacattagcttacaatcgctttaaatatgacagcataacctttacacaatttagttccagaaaacaatcattcggaaaaattattctgtcaacacgtatttccctggggttattctttaaatattttttatcgttaacgaaaattgatcctggtcaaaactatatatctctgccatcaataaaatccagcactcacattgctctcctttttatggnttctatgggtacacaaaaattaaaagctcaaagcttttttattttcagtttattgctgacgttaattttattttgcattactaccttatataacgaaaacacaaatgtaaaactcatcccacagatgaattacctgatggttgttgtggctttgtttttccttaacgccgtcatttttcttttcatgttaatgaaatatttcactaacaaacaaattttaccaacactcattttaagccttgcatttttaagtggccttatctatttagttgaaaccattgtaattatccataaaccaattaacggcagtacactgatccagacaaagtcgaatgatgtttctattttctatattttccgccaactcagttttatttgtttaacctcgctggcgctcttttgttatggaaaagacaacatccttgacaacaataagaaaaaaactggcattctgttgctggcgctgatcccttttttagtttttccccttctggcacacaatctgagcagttataacgctgactattctttgtatgtcgtcgattactgtccggacaatcatactgcgacctggggaatcaactatacaaaaatattggtttgtctgtgggcatttttactgttctttattatcatgcgtacacgattagccagcgaactatggccgttaatagcattattatgtctggcatcgctatgctgcaacttacttctactgactctggatgagtataatnnnnnnatctggtatatcagtcgcgggattgaagtctccagtaaactgtttgttgtgtcttttctgatttataacatttttcaggagctgcaactctccagcaaactggcagttcatgatgtgctgaccaatatttataatcggcgctactttttcaacagcgtagagtcattattgtcgcgacctgttgttaaggacttctgtgtcatgctggttgatattaatcagttcaaacgcatcaatgcccaatggggacatcgtgtgggtgataaagtgctggtttcaattgtcgatattatccagcaaagcatccgccccgatgatattttagcgcgactggagggtgaggtgtttggcttgctatttaccgaactcaatagtgcccaggcaaaaatcattgcggaacgtatgcgtaaaaatgtcgaactcctgaccggctttagtaacagatatgatgttcctgaacaaatgaccatcagtattggcacagttttttcaacgggtgacacgcgtaatatctcgcttgtcatgacggaagcagataaagccttacgcgaagcgaaaagcgaggggngcaacaaagtgattattcatcatatttaantgcaaaaatattcagagccatgctttttgcgtggcttttgcatacaatttattactattacccctaaatttcccctccccagcggcgcagagatgagtataattagcgcccctgtgccaggccgcaatcgaactttatctggttttctcgtttcactaaccgaaggagtgccatttatcatgaaattgcaccatagaatgctccggcattttatcgccgcaagtgtcattgtgctgacatcttccttccttatttttgaacttgtcgccagcgacagagcaatgagtgcctatctgcgctatatcgtgcagaaagcagactcctcctttctttatgataagtatcagaatcagagtattgccgcgcatgtgatgcgcgctctcgctgctgagcagtcggaagtgtcgccagaacagcggcgcgccatctgcgaggcttttgagtctgccaataatacccatggcttaaacctgactgcccataaatacccgggcttacgcggcacattacaaaccgcatccactgactgcgacacaattgtggaagctgcagcactattacccgcttttgatcaggcagtggaaggcaaccgccaccaggatgattacggttcaggtcttgggatggccgaagagaaatttcactattatctcgatctcaatgaccgctatgtctatttttatgagccggttaatgttgaatactttgcgatgaataactggtccttcctgcagtcaggaagtattggcatcgatcgcaaagatattgaaaaggtatttaccgggcgtaccgtattgtcgagcatttaccaggatcagcgtactaaacagaacgtgatgagtttgctgacgccggtgtatgttgcagggcagctaaaagggattgtgctgctggatattaacaaaaacaatctgcggaatatcttttacactcatgaccgccctctcctctggcgttttctcaatgtcacgctaaccgatacagattcggggcgcgacattatcatcaaccagagcgaagataatctgttccagtatgtcagttacgtccatgacttaccgggcggcattcgtgtctcgttatccattgatattctttactttatcacgtcttcgtggaaaagcgttctgttctggattttgacggcgttaattttgctgaatatggtgcggatgcacttccgcttataccaaaatgtgtcgcgagaaaatattagtgatgcgatgactggactgtataatcgcaaaattttaacccctgaactggagcagcggttgcagaaactggtgcaatccggttcttcggtgatgtttattgcaattgacatggacaagttaaagctaataaatgacaccctcggtcatcaggaaggggatttagcgattacgttgttagctcaggcgattaaacaatcgattcgtaaaagtgattatgccatccgactcggtggcgatgaattctgcatcattcttgtcgattcgacgccgcaaattgcagcacaactgcctgaacgtatcgaaaaacgtctgcaacatatcgcgccgcagaaagagatcggcttctcttccggtatttacgcgatgaaagaaaacgatacgttacatgatgcgtataaagcttccgatgagcgtttatatgtcaataagcagaacaaaaacagccgttcatgataaccttctgtggttgtttgcttgtaatctcaggagcgtgaaatgactgaaatggctaaaggaagcgtgacgcatcagcggttaatcgctttattatcacaagaaggtgctgatttccgcgtcgttacccatgaagcggtaggtaaatgtgaagcggtgtcagaaattcgtggcaccgctctaggccagggtgctaaggcactggtatgtaaagtcaaaggcaatggcgtaaatcaacatgttctggcgatcctcgcagccgatcaacaggccgatctgagccaactcgccagccatataggcggattacgcgcttcgttggccagcccggcggaagtcgatgaactcacaggctgtgtcttcggcgcgatcccccctttcagcttccatccaaaactcaaactggttgccgaccctctactcttcgaacgatttgatgaaatcgccttcaatgcagggatgctggataaatccgttattttgaaaaccgcggattatttnnncattgcgcaaccagaactggtcaatttccgccgcactgcgtaactagcctgtccgttcaataagcagaacggacaaaaccagcacaacagcaatggcaaaaaacgatgacgtgataatcagtgtctcgacgaacatttgatcgttcatagcatacccccgggagatagctgttttcacgttattgttagcgtgcacaaatggcagtttgatgacagttcgcctgattttttannnnnnnnacgtaaagattttctacttccttcctgcagcaagcgtaaagtaagcaggcttattattttttggcaaggaaaccacgatgtttgatgtcactttgctgatcctgctcgggttagctgcgctgggctttatcagtcataacaccactgtcgccgtttcaattctggtgttgatcattgtccgcgtcacaccgttaagcacctttttcccgtggattgaaaaacaggggctaagtatcgggataatcattctgacgattggcgttatggcccccatcgccagcgggacgctaccgccctcaaccttgattcactcgtttctgaactggaaatcgctggtggcaattgcagtaggcgttattgtctcctggctgggtgggcgcggcgtgacgttaatgggcagccagccgcaactggttgctgggctgctggtgggcactgttttaggcgtagcgctgtttcgcggcgtaccggttggcccgcttattgccacgggtctggtttcgctgattgtggggaaacagtagttaatcccgcaatatatcggcctggcgtttgccccaggcctttcttaaacatagtaataaaggccgttgttgaatcataccccagcgtatgagcaactttctgtacagtatcgcctttcactaatccctgaagcgccataatcagctgtaactgctgtcgccactggcgaaaactcaaccccgtctcttttactatcagtcgggcaagattgcgttcactcatcgcaaaaaagccagcccattgccccaatgccccccactcgacgggctctttcgccatcatctccaccatcgcgcggattttaggatgagaagaaacgggtaggtgcagctgttgttgtggctgctgagggagttcatcaaacaggacctgaattaatctgcgggtcaccggctcagcacgctgagtcgtcgtcctgtttgccagagttaaaattaattcccggcataagggcgatattttcaatgtgtaacatgttgtcggcattgtcactgcgctgggttcgataaacagaaaacagagttcagcgttagctgtcacttgattgctatgttccaccccgcccggtatccaaaccgcatattgtggcggcaccatccacaaagcattttccaccgtacaggtaattgcaccatgtagcgccagtatcagctgtcctttgcggtgctgatgtacaggactggttaactcatccgttccggcgtgaatacaaaatgcgaccgcggcttcatggtgtcggtcgggttcatagccattgagattcaacctgtgcatcattttgtccgaatttagcgataatttgtcattttagcttgattcaacataacaataaaaacggtaaggtacagcctcgtttgtaacaatgagaagcatatgncctgttcaacttcattaagcggcaaaaacaggnttgtccttatcgctggcattctgatgattgccactacattacgcgtcaccttcaccggcgcagcaccgttactcgatacgattcgttccgcttactcgctgacgactgcgcaaaccggcttattgaccaccctgccattattggcctttgcgctaatctcacctctggctgccccggtggctcgacgttttggtatggaacgtagcctgtttgccgcgttacttttgatctgtgcaggtatcgcaattcgctctctcccttcgccttacttattatttggcggtacagcggtcattggcggtgggattgcattaggtaatgtcttactgccaggattaattaaacgcgatttccctcattccgtcgccagacttaccggcgcatattccctgacaatgggagctgcggcggctctgggatcggctatggtagtgccgctggctttgaacggttttggctggcaaggcgcgttgctcatgctgatgtgttttcctctgctggctctttttttatggnnnnnnnnnnnnnnaanccaacaacatgcaaatttgagtacttcacgcgccttacatactcggggtatctggcgttcgccgcttgcctggcaggtaacattgtttcttgggatcaactcactggtctattacgtgattattggctggcttccggcgatcctcatcagtcacggctatagcgaagcacaggcgggttcactgcatggtttgctgcaactagccacagcagctcccggtttgctgatcccacttttcttacatcatgtgaaagaccagcgtggtattgcagcgttcgttgccttgatgtgcgcagtgggcgcggttgggctctgcttcatgccagcgcacgcgatcacctggactctgcttttcggttttggttccggcgcaacaatgatactggggttgacgttcattggtctgcgggctagttctgcgcatcaggcggcggcactctcggggatggcacaatccgtcgggtatttgttggcagcctgtgggccgccgctgatgggtaaaatacacgatgctaacggtgactggtccgtaccactaatgggtgttgcaatactttcactactgatggcgattttcggactttgtgccgggagagacaaagaaattcgctaatatccggtactatagtgacgtgacaaatcatgcgtgaaagggagaacaaacacgatgaatattcagtgcaaacgcgtttatgatccggcagaacagagcgatggttatcgcgtactggtcgaccgcctctggccacgcggtatcaaaaaaaccgatttagcccttgatgagtgggataaagaaatcacgccgtcaacggaactgcgcaaagcctttcacggcgaagtcgtcgattttgcaacctttcgcgagcaatatcttgcagaactggcacaacacgagcaagaaggaaagcggctggcggacatcgccaaaaaacagccgctgaccctgctctactcagcaaaaaacaccacgcagaaccatgcgctggtgctggccgactggctacgtagcttgtgattttagtacagcatccggcggttatttttcaccagccggatggtccagtcgccacaatgcccattcatcaatcgtttcaccgcccggtaatttgcaattgttgctgaccccttgcgctgtctgcactggaatgagcgtcccgcccttctgctggcaatagaccgacgccggatttgccataccaatctgcggcggtttaggtgcttctggctgagaaggggttgaacaaccagccaggaccagcaagcaaggcagaacaaaactgataattttcatttattgatctcacatatgtatccaagcttagagtatcgcggtatcgttttgttttgcagcactatttttattacattcactcaaaacatattacgtcttgtttcatctttgttgatgatgttttatcatgcctgcaaagattaaataatcagcatttacccgccgtatcctggagttgtttcgtgtcagatcagattatcgcccgcatctcgcaatcccttgccaaagaacagtcactggaaagtctggtccgacagcttctggagatgctggaaatggtcactgatatggaatcaacctacctgaccaaagtggatgtcgaagcgcgcctgcagcatattatgtttgcccgtaacagccagaaaatgcacatcccggagaattttaccgtctcgtgggattactcgttatgcaaacgcgccattgatgaaaactgctttttcagcgatgaagtccctgaccgttggggcgactgtattgcggcacgcaatcttggcatcaccacatttctgagcacgccaattcacttaccggatggatcattctatggcacgctttgcgccgccagcagtgagaagcgccagtggagtgaacgcgcggaacaggttttacagttattcgccggactgattgcacaatatattcaaaaagaggcactggttgaacagctgcgcgaagccaatgctgcgctgattgcgcaatcgtataccgactcgttaaccgggctaccgaatcggcgggcgatttttgaaaatctgacgacgctgttttccctcgcccggcatcttaaccaaaagataatgatcgcgtttatcgatctggataacttcaaattaatcaatgatcgttttggtcataatagtggcgatctgtttctcattcaggttggcgagcgccttaatacgctccagcaaaatggcgaagttattggtcgtctcggcggtgatgagtttttggttgtttcactaaacaacgagaatgcggatatttcgtcgctgcgagaacgcattcagcagcaaatacgcggagaatatcacttaggtgatgttgatttgtattatcctggtgccagtcttggcatagtagaagtcgatcctgaaacgaccgatgcagacagtgccctacatgctgccgatatcgcgatgtatcaggagaaaaaacacaaacagaaaacaccttttgtcgcgcattcagcgccacattcctgaggcgtattcacatccttttgattggtgataacatgcgaatcggtattatttttccggttgtaatcttcattacagcggtcgtatttttagcatggttttttattggcggctatgctgccccgggagcataaagatgaaaaaaacaacgatcattatgatgggtgtggcgattattgtcgtactcggcactgagctgggatggtggtaacgtcacatctaaaaaatagcaaaggctgcctgtgtgcagcctttgtgcaatttacgcgttaacttttaatcttcctgtagataaatagcacgacaatcgcaccaataacggcaaccacgaagctgccaaaattgaagccatcgactttaccaaagccaaacagcgtgctgatccaaccgccgactacggcaccgactatccccagcaggatagtcataaagaatccaccaccatctttacctggcatgatccacttcgccagaataccggcaataagcccaaaaataatccatgacagaatgcccattgtttcctcacttatctgttttgcattagcgggttagtcgctgataaaaagcatagcacaacatcgggagggcaagatttgtgacgagcatcacggaggtttttttgcgatggcgcagaaattgcgccatcaacgatcagtgataattaccaaccacaaacatcatgttcgttttccgtgtcataagaacgcacggtattcaccagatcttttatcacttcagccgccacttctggcaccagcaaagtcatcggcgtctctgtttcataatcgacagaaacgccattgctgttattggtgacggtcacggtatacgttgctttgcccatgattcatttcccgttatgaatgactttccgttgttgcgcaccttccatcaggacttcaggagccacgaagaagtcaatgttgaaataagtatcgtcagtcatggcttcaatgttgtgccacttttctggagggaacaccgcaaactgccccgcttcgataaggatcacctgatcaggctctgcactgtgttcatcagcgtagccgagatatttgaccgccccatgcataacggaaaggcgtgggtaaacccccgggcgcgttcctttatcaagatgacgttcgaatattccggcaggcgcagtttgtttattccagaaaggcgttgagcgcgtatgaatataattctgtgggatttgcagcatccttttccctccttcggtgaatgcgctgaaaacggtttattccagccgtttcagggtacgcctgataatttgcattttaaataccatttattggttactttttagcaccatatcagagaaaaatcagggaggattatagatgggaagcccgcgacaacgcgggctgaaagcatcaggattgcagcgtcgccagtcgggcagcgaaacccacgaacatcaaaccaatcagtgagttgcccactttagccagtttctttttggtacgtatgtactgcgtgacaaaagcaccagatataatcaggaagctcaaatagcagaaactcaccagttccagcgtcgtcgccagaataaagaatgaaattcccgtatgtggggcattaacatcgataaactgtacganaaacgacacatagaacaaaatggctttcggattagtcaggctcaaaattaacgcgcnttnaaaaatagcaccgtattggggctcatcggatttggcctcgttatttttacccttcagggtcgcgtaaagaattttactccccagatagagcaaataaaacgcaccaagataacgtacaatgttgaataatatcggggtggtcttaattaatgtcgccactccagcccatgccagaaacatcaataccgcatcgccaataaatacaccgcaggccgcaagataaccgcctttcataccgctactgacgctntttttgagtacaaacagggtatttggccctggcnccaacacaataaaaatggccccaaccagataggtccagtaattcagaaccccgtattcagcgaacacattaacctctttaattatctttcgatcatgcgcgattaaaggtgaatatgctaaccaatctgtagcggcttagaaaggagaaaatcaggttttaacctgatatcaacccgataattgaatcattaatcaggcatgctccagtgaaaaattcgggtagtgctcggcaaaatactggcgtaaaaattctaccgttatccgcactttcgctgacgtcgccagccttgaaacataaacggcccagacgttcgctggctggtaatattccggtagcacttgcactaaatgaccactggcaatgttttcgctaacatcccaccaggaacgcagagcaatcccctgcccatcgagacaccactgatggacaatttctccatgattagacgacagtgggccggtgactttaatcgcatggtggccttctttattgcgtaattgccagacaccaaaaggatgatcgcgctctttaatgaccaggcacggcaatgcagaaagatcggttaaatgtttcgnnnnnccatgttgcgcaataaattccggcgacgcgcagagaatgcggtaattggtcgccagtttgcgggcgattaaattaggggcgatgtcatcgccaatgcgaatatcgagatcgacaccttcattgaccaaatcgaccagccggtcttccacatcaaaacgtaattccagttgcggatacgccttcgccagcgctgataacgccggagccaccacctgtcgtccaaaaccaaagctgctgataatacgcagcatcccctgtggcacctgacgcacgtcagaaagttcgtccatcatctgaccgacatcctgcaaaatccgctgcgcccattcataaatccgctctccttcttcggtaatggtgacgcggcgggtggtgcggtgtaacaacaccacgtttagcgtttgctccagcaaggcgatgcgcttgctgacgaacgccggtgaaacgcccagttcttccgccacggcggcaaaaccagcccggcgagccaccagcataaagacgcgcaaatcattcagcagcggtaaattattcatgattcgtgttttatgtttcaccagttacggggattaattccttttcagtcaattataggatggtgatgttgtcaattttgatggtcaggaagtgagaacccaatgatgaaaacgatgcgtattgctgcgatcccgggagacgggattggcaaagaagtccttcctgaagggattcgcgtgttacaggctgccgctgagcgctggggcttcgccttgagttttgagcaaatggagtgggcgagctgcgagtattacagccatcacggtaaaatgatgccggacgactggcatgagcaacttagccgtttcgacgccatctattttggtgccgtcggctggccggacaccgttccggaccatatttcgttgtggggttcgctgctgaaatttcgtcgtgaattcgaccagtacgtcaacctgcgcccggttcgtctctttcctggcgttccctgcccgctggcgggaaaacagcctggcgacatcgatttttacgtggtcagggaaaacaccgaaggcgaatattcctcgctcggcggtagagtgaatgaaggtacagagcatgaagtcgtcattcaggaatcggtatttacgcgtcgtggtgtcgatcgcattttgcgttatgccttcgaacttgcgcaaagccgcccacgtaagacgctaacttctgccactaaatcaaacggtttagccatcagcatgccgtactgggatgagcgagtggaagcaatggccgagaattacccggagatccgctgggacaagcagcatattgatattctctgcgcgcgttttgtgatgcagccggaacgcttcgatgtggtggtggcgtccaatttgtttggcgatatcctttccgatcttggcccggcctgcaccggcaccattggcattgccccatccgccaacctgaatccggaacgcactttcccctcgctcttcgagcctgtccacggttccgcgccggatatctacgggaaaaatattgctaaccctatcgccacaatttgggccggggcaatgatgctcgattttctcggcaatggcgatgagcgtttccagcaagcgcataacggtattctggcagcgattgaagaagtgattgctcacgggccgaaaacaccggatatgaaaggcagtgccaccacgccacaggttgccgacgcgatttgcaaaattattttgcgttaaggtcaaaccagtttatttgaaccgcgtcactgacgcggttttnttattcgttctttgcagttaataacctgcgtcatttcaccttttattgtttccgtttcgtgttttatggctttccgtattcttaattgtttaatttatgtaacatgcaaataatcaattcgttaaacacgacatacaactcattaccctgcaaataattacaactggcaaaagccagagacgggcttttatgcccaggagatgactcatgatgagcaatgttaagaaaaaagatgtgccgctgataagcatcagcctggtggccattcttttcatngcagctgcattaagccttttcccacaacaatcggccgacgcggccaacgcaatatacacttttgttacgcgtacgttaggttccgcagtacaggtattggttttgctggcaatgggactagtgatttatttagccaccagtaaatacggcaatattcgtcttggcgaaggaaaaccggaatacagcacgctctcctggctgtttatgtttatttgtgccggtttaggttcttctacgctttattggggggttgctgaatgggcctattattatcaaacgcctggattaaatatcgcaccgcgttcacaacaggcactcgaatttagcgtcccttactccttcttccactggggcatcagcgcctgggcaacttatacgctggcctcattaatcatggcttatcactttcatgtgcggaaaaacaaaggtctgagtctttccggcattattgccgcgattaccggcgttcgcccgcaaggcccatggggaaaactggttgatttgatgttcctgatcgccactgtcggcgcactgactatttcccttgttgtcaccgcagcaacctttactcgtggactttccgcactgaccggtttacccgataacttcaccgtgcaggcatttgtgatcctgctttccggcggcattttttgcctaagctcatggattggtatcaacaacggtttgcaacgtctgagcaaaatggttggctggggcgcgttcctgctgccattactggtgctgattgtcggtccaaccgaatttattaccaacagcatcatcaatgccatcggcctgaccacgcaaaacttnctgcaaatgagcttattcaccgatccgcttggcgatggttcatttacccgcaactggaccgttttctactggctgtggtggatctcatacacccctggcgtagcaatgtttgtcacccgcgtttcccgcggtcgtaagattaaagaagttatctggggactgatcctcggcagcaccgtcggttgctggttcttcttcggcgtaatggaaagctatgccattcatcagtttatcaatggcgtaatcaacgtcccacaggtgctggaaactctgggcggcgaaacagctgtacagcaagttctgatgtcgttgccagccggtaaattgttcctcgccgcatacctgggcgtgatgattattttccttgcctcgcatatggatgcagtggcctacaccatggcggcgaccagtacgcgtaatctccaggaaggtgacgatcctgaccgtgggctgcgtcttttctggtgcgtggtgatcactctgatcccgctttccatcttgtttaccggtgcttcgctggaaacgatgaaaaccaccgtcgtgctcacagcccttcccttcctcgtcattttactggtgaaagtcggcggatttattcgctggctgaaacaggattacgccgacattccggctcatcaagttgaacattatctcccgcagacaccagttgaagccctggaaaaaacaccagtgctccctgcgggaaccgtattcaaaggcgacaactgagcgccatcatcctaacgataaaggtatccctatgagcaatctgagccctgactttgtactacccgaaaatttttgcgctaacccgcaagaggcgtggaccattcctgcccgtttttataccgatcagaacgcctttgaacacgaaaaagagaacgtcttcgccaaaagctggatttgcgtcgctcacagcagcgaactggcgaatgccaatgattatgtgacgcgtgagatcattggcgaaagcatcgtgctggtacgcggtcgtgataaggttttgcgcgcgttctataacgtgtgtccgcaccgtggtcatcagttgttgagcggtgaaggaaaagcaaaaaatgtgattacctgcccatatcacgcatgggcattcaaactcgatggcaatctggcccatgcacgtaactgcgaaaacgtcgccaatttcgatagcgacaaagcgcaactggttccggtgcgtctggaagaatatgccggattcgtcttcatcaacatggaccccaacgccaccagcgtagaagatcagttacccggtctgggcgcgaaagtgctggaagcctgcccggaagtccacgatctgaaactggcggcccgctttaccacccgcacgcctgccaactggaagaacattgtcgataactatctcgagtgctatcactgtggtccggcgcatccaggtttctccgactccgtacaggttgatcgttactggcacaccatgcacggtaactggacgctgcaatacggtttcgccaaaccgtccgaacagtcgtttaaatttgaagagggtacggatgcggcattccacggtttctggctgtggccgtgcacgatgctgaatgtcaccccgatcaaagggatgatgacggtcatttatgaattcccggtggattctgaaactaccctgcaaaactacgatatttacttcaccaatgaagagttaaccgacgagcaaaaatcgctgattgagtggtatcgcgatgtgttccgtccggaagatttacgtctggttgaaagcgtacagaaagggctgaaatcgcgtggctatcgtggtcaggggcgcatcatggccgacagtagcggtagcggcatttccgaacatggtatcgcccatttccataatctgctggcgcaggtatttaaggactaatgacatcggcggcggtattttccgccgccgggctgatttttgatggagtacagcaatgtcagactatcaaatgtttgaagtacaggtgagtcaggtggaaccgcttaccgaacaggtgaaacgcttcacgctggtggcaaccgatggcaaaccgctgcctgcgttcaccggaggaagtcacatcatagtgcagatgagcgatggtgataaccagtacagcaatgcgtattcactactgagttcaccgcataacacctctagttatcagattgccgttcgactggaagaaaactcgcgcggcggttcccgctttttgcatcagcaggtaaaagtgggcgatcggttaacgatctcaacgcctaataacctgtttgcgctaattccctcagccagaaagcatctgtttatcgcgggcggtattggtatcacccctttcctgtcgcacatggcagagttgcaacacagcgacgtcgactggcagctacattactgctcgcgaaatccagaaagttgcgcatttcgtgatgagctagtccagcatccgcaggctgagaaagtccatttgcatcattcatcaaccggaacacgactggaattagcgcgattattggcggatatcgaacctggcacacacgtttatacctgtggccccgaggcgctaattgaagcggtaagaagtgaagctgcgcgtctggacatcgctgccgatacgctgcactttgagcaatttgctatcgaagacaaaaccggcgatgcatttaccctggtgcttgcccgttccggaaaagagtttgtggtgccggaagagatgactattttgcaggttattgaaaataataaagccgcgaaagtggaatgtttatgtcgtgaaggggtatgcggaacctgcgaaacggcaatactggaaggtgaagctgaccatcgggatcagtattttagcgatgaagagcgtgccagccagcaaagtatgttgatctgttgttcgcgtgcgaagggtaaacgcctggtgttggatttgtagtttgccgaagcnnnnnngnnncgctgagcgcgcccagtccggcttcggaaaattttactgcggatattcctgcaataaattgtgtaatgcttccgccatcagctcaccacgccagccggaaatcagctccggcaaattgttctgcggtttcagtttccagtgccagttcagcagttggttgatttgccgacgcgatgccagcaattcggcgctgatcttgtgcgtttcgctcacgtcagtaatcagcgacttaatcgctttaaacgctttacgataacccggcatgtccatcaggttaagcatcggctgcggtaaggcctcttccggcaatgtctgcgctttttccaccagcgccagcagcgttttaccgtgaaagcggatttcgctaccggataaacccaggctgtccagttcgcctaaacttcccggcatataacgcgctaccgaccacaaatgctcttcacgcacgacaaagttcaccgccagatcgcgctctcgcgccttgcgcagtcgccagtcggctaacagttgcagacaggccagttggcgtgtgcgtaattgccaggcattggtgatatcacgccaggcatcttccggcgcaacgacttcctgacgacgcatttgcatcaggcgacattcatccagcgccgctggtnnnnngccggaggcctccgtttctaccataagcttggcggtgatcggtaacagataccagacatccgccgctgcatattcacactgacgttcggtcagcggtctggccagccagtcggtgcgcgattcactcttgtccagcgtaacgccggaatactcttccaccatggaagcgaaaccccatgacatcgggcgtccgcagaaggcagcaaggatttgcgtgtcaatcaggggttgtggtaattcgccaaagacattgaggaacacttccagatcttcactgcctgcatggagaaattttgtgatggacggatcgcgcaggatcgctntcagcggtgaccagtcggtgatcccgagaggatcaattagcgccagatgctcgccatcgaaaagttgaatcaaccccagctgcgggtaataagtgcgcgtacgaacaaattcagtatccagggctatcgccggaaaggcacggacggcttcacacaaagaagccagcgcatcgnccgtggtaatcatttggtaattcaaattgttttctctttagtgggcgtcaaaaaaaacgccggattaaccggcgtctgacgactgacttaacgctcaggctttattgtccactttgccgcgcgcttcgtcacgtaattctcgtcgcaaaatttttccgacgttagatttcggtaactcatcacgaaactccaccagcttcggtactttgtagcccgtgagctgacggcggcaaaaggtcaccagtgactcttcggtaagcgatggatcttttttcactacgaagattttcaccgcttcaccactggagccggaaggtacgccaacagccgcgacttcctgtacgccaggatgctgcatgacgacatcttcaatctcgttgggatagacgttaaaaccggaaaccagaatcatgtcttttttacgatcgacaatgcgcaggaatccttcttcatccattaccgcgatgtcgccagtgtgtaaccagccgtttttgatgatttcatcggtagcatccggacgctgccaatagcccagcatcacctgtggacctctgacgcaaagttcacctggctgacctggcggtacttcattatcgtcgtcatccaccagtttggcttccgtcgacggcaccggcaaaccaatgctaccgctatgataatcaatatcataggggttcacgctgaccagcggcgcacattcggtcaggccataaccttccagcagatactgtccggtcagtttcacccagcgttctgccaccacttgctgaacaggcatcccaccgcctgcagaaaggtgcagactggagaaatccagttgttgaaactctttattgttcagcaacgcgttgaacaaggtgtttacgccggtgatagcggtaaacggatatttcgccagctctttgaccagccccggaatatcccgcgggttagtgataagcaggttctgcccacccagttcgataaacagcaggcagttaatggtcagtgcaaaaatgtgatacagcggcagcgccgtcaccaccagctctttgcccggatgcagcagaggcccatacgtagcgttaacttgttccaggttcgccagcatattgcggtgagtcagcatcgcgcctttcgccacacctgtggtgccgccagtgtattgcaggaaggctaaatcttctggcaccagttcaggtttgacatactgcatacggtagccgttgtgcagggcgctacgaaatgaaatggcatctggcagatgatatttcggcaccagacgtttgatgtatttaacaacgaagttaaccagtgtgcctttcgctgtggaaagctgatcgcccatacgggtcaggataacgtgctgaactgcggttttatcnaccactttttccagcgtgtgagcaaagttggacacaatgacaatcgccgatgcgccgctatcgttaagctgatgctcaagctcacgcggggtatacaacgggttaacgtttacgacgatcatcccggcacgcaaaatgccaaacagcgctaccggatattgcaataaattaggcatcatcaacgcaacgcgatcgcctttcttcagccccaacccttgttgcaaataagcggcaaacgcgcgactgcgttcttccagcttgcggaaggtcatcacctcccccatattcacaaacgcaggctgatcggcgtagcgcgcgaccgactgctcaaacatatctaccagagattgataacggtcagggttgatctccgtcggaacgtccgcgggataacggttaagccaaaccttcttcaattcttcacctctaaaatgcgtgttcgtcgtcatcgcaaccccaaatgatatacatgccgttaacataatattaactcatcataccagcttgataattacccaacgaaaaggttgcgaagcgcgtcactatttatttttatctttaccgtaagaatgcagaaacagcggaccagccgctgtttctttttctttaaaaacaagcaattattcagttacaactgtttgtactctcgcggggccgggattataccagccccatccgccgtggccatagggccagccacgaccgccataaaaccagggatcaatcggctgaggcggcataatcacctcctgggttaaatgccaacgtttgtaacctgttgcctgcatcaccataaatttatagggcgtgttgccgatttttccgtcaaccgcaccagtgattggcccgactaccgtaaccagttgtccacggaaatccaccgggtccagaaaaccgttcacatcggcataaatgcgaccgcgagaaggttctcccagcgtcggtctggctccgctgtccagcggtacggtagcaatttccaggcgggttttcccttgctggttttgtaccgcaaccactttgccaccaaagcgtgcctcctgaccaacgtacagctgcggcgcactcatcacccgaactaaatcttgttgcggcgtgggactgctgcctttaatggcgtccggcacagtgacacaaccgctcagcattagcgcaaacgtacctgccagtatgcctttgataacattcttttgaaccgccatgatgcgactcctttttttctcagggcatactcttaagattcattctttgcccggaagtttcttccatgcgacgttgttacgtaaataaaccggttcggcatgttccaccgccaccgttttaccctcggcaaacatctgacaagcaatcggcagcatatcttctgcagcgggcagtaaaacttctccgtcgcgcaaaaccagtccgctctctttaccgagatccggccaggcttgccagcctgtacctaccgtcacccattccccggaaagctgttgcattcgttcatgaacgagttcgggtttgagtacggcttcggtttcttcaccgtgccagataccgttttcatcacgctgatattcggcccagtaaacttcgcccattcgcgcgtcaatggctgacagcacgcgtgttgcgccgtttttgcgccacgccccttgcgccatcgtcattagcgtggagacgccaatcatcggtaattccgcgccaagcgncagcccttgcgcgatgccaataccaatgcgcacgcctgtaaagctaccggggcnnnncccgtaagccagagcgttaatatcagtcagggaagttccgctggtggtcaggatatcctgcaccatcggtaagattcgttgagtatgttcacgagggcaaagctcaaaatgagcgttgacagtaccgtcgttccacagggcgacagagcaggcctctgtcgcggtatcgatagccagaattcgcatgggtcttcgtgcttagatcaataaaaaggcgcgcatcataccatactccgtaacaaattacctggaggatggtatcgcaaggaaacgaaccgcacgggcaatgtcacgggtgcgtggcgcgggcggcagactggcgagaaacgtcgcgccgtaaggacgcatcaccagccgattgtcacaaattaccaaaaccccgcgatcgtcggcgtcgcgaatcagtcgcccgactccctgcttgagagtaatcaccgcatccggcagttgtacttcatcgaacgggtcgccaccgcgcaaacggcaatcttccatgcgcgcttttaacaatggatcatcaggcgaggtaaacggcaatttgtcgataatcaccaatgacaatgtatcgccacgcacgtccaccccctcccagaaactactggttgccacaagaagcgcgttaccggcactgacaaattgctgcaacagttgccctttgctggtttccccctgcaataatacgggaagcgtcatggtagcgcggaactgctcggccagatcgcgcatcatggcgtgcgaggtacaaagcataaaacagcgaccgttgttagcttcgatgatcgggcgcagcatagccgccagttgccgcgcggaacccggttgattggtttgcggcaggttgcgcggcacacagagtaacgcctggcggctgtaatcaaacgggcttggcaatagcaacgactccgcctgttctatcccaagccgcgaggtgaaatgatgcagatcgtcgttcaccgacagcgttgctgaggtgaagatccagctaccgggcttttgcgccattaactctttgaatttatccgccacgctgagcggcgtgagagccagagtaaaatggcgcgaagtgcattcgtaccagtagctgtagcccggctgattgatctcttttagccgcttcagccgtgtgcgatacaacgtggcgcgctcaaatgccgcatccagcaaggcggaacgccccagtgacagtttcgccacgtcataacaaagttccagggtgtcatcgagcagtaaaaatgcccgctgaatttgcggattagctaacagctcacgcaggttaccgcgataacctggttcaccgagttgcagacgaaaatcctgcgcactctgggcaagacgatcagcgcacttttgtaactgctgggtgtcttttaattcggtgcggtaggcgatggtgatgtcttttgccaggtcgagcagttgtcgactggagagtgactgaccaaaatactggctggcaatgtccggtagctggtgggcttcgtcgaagatcatgacgtccgcttccgggatcaactcgccaaatccactctctttaaccaccatatccgccagaaagagatgatggtttaccaccaccacatcggcgtccatcgcttttttacgtgctttgaccacaaagcaatctttatacatcgggcagtcgctgccaagacagttgtcgttggtgctggtgaccagcggccacgcctgcgaatcttccgccacgctgacgcaggtgctgatatcaccatcgactgtttgattagaccaggagcgcagcaggatcacatcgcttaatatttgtaccggaagatcgccccccgccagcgcctgctgttcgagacgttcgaggcagaggtagtttgagcgccctttcagcaacgccacgttgcccgtgtatttcaacgcctttgagaccgtcggcaaatcgcggctatagagctgatcctgcaacgcttttgagccggtcgagataatgactttctttttcgcccgcagcgcaggggccaggtaagcgtaggttttgcccgtaccggttcctgcttccaccaccagcggctggcctttttctatcgcctgggtgacggctaccgccatctgtcgctgtggttctcgcggcttaaagcctggtatcgctttcgccagctgaccgtctggtgcaaaatcgtccgtcacactaccccctgttgatttgaacagggattatgtcaggatgagggcgctttcgccagttgaagtggtgacggcgacctcacattgtggcagtctttgcagcacgaaaatggaaggataatgaggataaaatgatgactatcgttcgtatcgatgctgaagcccgctggtctgatgtagtaatccacaacaacacgctctactacactggtgtaccggaaaacctcgacgccgatgcctttgagcaaaccgccaacaccctggcgcagattgacgccgtgctggaaaaacagggcagcaataaatcgagcattctggatgccaccattttcctggccgataaaaacgacttcgcggcgatgaataaagcgtgggatgcctgggttgtcgcgggtcatgcgccggtgcgctgcacggtacaagcgggtttgatgaacccgaagtataaagttgaaattaagattgtggctgcggtgtaagctttatcgaagcaaaataagtcagacgataatttatcgataatactggtcggttatacataaatcgaccagagaataagatattactgttgatgcttntgctaattcattatttatttttataatttcaattttatctataaaactaactatataaataaacataaccatgccgttgtgttcgccctttgattagcaactctggttttctttcttagctgaacaatctggttatagcgtgcggactgaccgttaattttctccatcttactggataacacaccatgagctgctacctttaaaacacctgaatgtcaacaggttaactcgtgccatatcgttataatccctttgatattagatgcaaattaaggtcatatatagccttatcgataacatggttaattttaaggataagaatatgcctgctgtaatagataaagccctggatttcattggtgccatggatgtatcagcgccaacaccaagttcgatgaatgaaagcacggcgaagggaatctttaaatatttaaaagaactgggagtacccgcgagtgccgctgatattacggcgcgagctgaccaggaaggctggaaccctgggttcacggaaaaaatggttggatgggcaaaaaaaatggagacaggtgaacgctctgtgattaaaaatcctgagtacttttcaacatatatgcaggaagaactaaaagcactggtctgagttaaatttatatcagcataaatgggtcaggacgcttttaatcacatataaaaagcgtcctttttctcacaatcaaataatcatcagcttctataacgaaatcgatacggattagtgtgttactcgtcttcatcctcaaaacgcgccacgattcgctcgccggagtggttggcacgcagctcttctgccaccagcgcgattgcctggccgctgctcatcccttgtgccatcagttcctggatccgctcgacagctttttgctgctgttcatgggtgagtgaaggtaaacctgcaaacattgttaactcctgctaaattgttggcgctaattatttcatgctacccggcacatagccagtagagtcaggactgatgaagacgttatctcccgctgtgattactttaccctggcgtcaggacgccgctgaattttatttctcccgcttaagccacctgccgtgggcgatgcttttacactccggctatgccgatcatccgtatagccgctttgatattgtggtcgccgatccgatttgcactttaaccactttaggtaaagaaaccgttgttagtgaaagcgaaaaacgcacaacgaccactgatgacccgctacaggtgctccagcaggcgctggatcgcgcagacattcgcccaacgcataacgaagatttgccatttcagggcggcgcactggggttgtttggctacgatctgggccgccgttttgagtcactgccagaaattgcggaacaagatatcgttctgccggatatggcagtgggtatctacgattgggcgctcattgtcgaccaccagcgtcatacagtttctttgctgagtcataatgatgtcaatgcccgtcgggcctggctggaaagccagcaattctcgccgcaggaagatttcacgctcacttccgactggcaatccaatatgacccgcgagcagtacggcgaaaaatttcgccaggtacaggaatatctgcacagcggtgattgctatcaggtgaatctcgcccagcgttttcatgcgacctattctggcgatgaatggcaggcattccttcagcttaatcaggccaaccgcgcgccatttagcgcttttttacgtcttgaacagggtgcaattttaagcctttcgccagagcggtttattctttgtgataatagtgaaatccagacccgcccgattaaaggcacgntannnnnnnnnnccgntcntcaggaagatagcaaacaagcagaaaaactggcgaactcagcgaaagatcgtgccgaaaatctgatgattgtcgatttaatgcgtaatgatatcggtcgtgttgccgtagcaggttcggtaaaagtaccagagctgttcgtggtggaacccttccctgccgtgcatcatctggtcagcaccataacggcgcaactaccagaacagttacacgccagcgatctgctgcgcgcagcttttcctggtggctcaataaccggggctccgaaagtacgggctatggaaattatcgacgaactggaaccgcagcgacgtaatgcctggtgcggcagcattggctatttgagcttttgcggcaacatggataccagcattactatccgcacgctgactgccattancggacaaatatactgctctgcgggcggtggaattgtcgccgatagccaggaagaagcggaatatcaggaaacttttgataaagttaataagatattacgccaactggagaagtaagacgtggaataccgtagcctgacgcttgatgattttttatcgcgctttcaacttttgcgcccgcaaattaaccgggaaaccctaaatcatcgtcaggctgccgtgttaatccccatcgtccgtcgaccgcaaccggggttgttgctgactcagcgttcaattcatctgcgtaaacacgctggacaagtggcattccctggaggtgcagtcgatgacacggacgcatcagttatcgccgccgcgctgcgcgaagctgaagaagaggttgctataccgccttccgccgttgaagttatcggcgtgctgccgcccgtcgatagcgtaactggctaccaggtaaccccagtggtcggcattatcccgcccgatctgccgtatcgcgccagtgaagatgaagtttccgctgtgtttgaaatgccgctcgcccaggcattacatctgggtcgttatcaccctttagatatctaccgccgcggcgattcacatcgggtatggctatcctggtacgaacagtattttgtatggggaatgaccgcaggcataattcgtgagctggcgctgcaaattggtgtgaaaccctgactatacttatctttacatctacaaaacactacttgagacaatcatcgcaatattagttaaatcgcggtttttgattagtttaattcatgtgaatagttaagccagtcgccgcgttccctcttacactatgcgctgttattagttcgttactggaagtccagtcaccttgtcaggagtattatcgtgattagtctattcgacatgtttaaggtggggattggtccctcatcttcccataccgtagggcctatgaaggcgggtaaacagttcgtcgatgatctggtcgaaaaaggcttactggatagcgttactcgcgttgccgtggacgtttatggttcactgtcgctgacgggtaaaggccaccacaccgatatcgccattattatgggtcttgcaggtaacgaacctgccaccgtggatatcgacagtattcccggttttattcgcgacgtagaagagcgcgaacgtctgctgctggcacagggacggcatgaagtggatttcccgcgcgacaacgggatgcgttttcataacggcaacctgccgctgcatgaaaacggtatgcaaatccacgcctataacggcgatgaagtcgtctacagcaaaacttattattccatcggcggcggttttatcgtcgatgaagaacactttggtcaggatnctgccaacgaagtgagcgtgccgtatccgttcaaatctgccaccgaactgctcgcgtactgtaatgaaaccggctattcgctgtctggtctcgctatgcagaacgaactggcgctgcacagcaagaaagagatcgacgagtatttcgcgcatgtctggcaaaccatgcaggcatgtatcgatcgcgggatgaacaccgaaggtgtactgccaggcccgctgcgcgtgccacgtcgtgcgtntgccctgcgccggatgctggtttccagcgataaactgtctaacgatccgatgaatgtcattgactgggtaaacatgtttgcgctggcagttaacgaagaaaacgccgccggtggtcgtgtggtaactgcgccaaccaacggtgcctgcggtatcgttccggcagtgctggcttactatgaccactttattgaatcggtcagcccggacatctatacccgttactttatggcagcgggcgcgattggtgcattgtataaaatgaacgcctctatttccggtgcggaagttggttgccagggcgaagtgggtgttgcctgttcaatggctgctgcgggtcttgcagaactgctgggcggtagcccggaacaggtttgcgtggcggcggaaattggcatggaacacaaccttggtttaacctgcgacccggttgcagggcaggttcaggtgccgtgcattgagcgtaatgccattgcctctgtgaaggcgattaacgccgcacggatggctctgcgccgcaccagtgcaccgcgcgtctcgctggataaggtcatcgaaacgatgtacgaaaccggtaaggacatgaacgccaaataccgcgaaacctcacgcggtggtctggcaatcaaagtccagtgtgactaatacttcttactcgcccatctgcaacggatgggcgaatttatccccgctttctcgtctgctgtaatattccccactacacttccactgttgcgtcaggcgtttgtcgccatacgcttacagagtggcccgcatgcaaaaagcacaacggatcattaaaacctatcgccgtaatcgaatgattgtttgtacgatttgcgcactcgttacgctcgcttcgaccctgagcgtgcgatttatttcacagcgtaacttaaatcaacancgggtagtacaattcgccaatcacgctgtagaggaattagataaagtactgcttcccctacaggcaggtagcgaagtcttgcttccgctgattggtctgccctgctctgtcgcccatttgccattacgtaaacaggcggcaaaactccaaactgtgcgatccattggcctggtgcaagacggcacactttattgctccagcatttttggttatcgcaatgtgcccgtcgtggacattctggctgaacttcctgcaccgcaaccacttttacgcctgacgaccgaccgtgtcctgattaaaggcagtccggttttgattcaatggacgcctgcagcgagcagtagcaatgctggggtcatggagatgattaacatcgacttactgacggcaatgctgcttgagccacaactgccgcaaatcagtagcgccagcctgacggtggacaaacggcatttgctctatggtaatgggctggtagattcccttccacaacctgaagacaatgaaaactatcaggtttcttcgcaacgctttccttttaccattaacgttaatggtccgggggctacggcgctggcatggcactatcttccaacacaattaccgctggcggtactgctaagtttactggtgggctacatcgcctggctggcgaccgcttaccgaatgagcttttcccgcgaaatcaatctgggcctggcgcaacatgagttcgaattgttctgtcagcctttgcttaatgcgcgcagccagcaatgtattggtgtagagattttgctgcgctggaacaatccgcgtcagggctggatttcaccggatgtgtttattcctatcgcggaagaacatcatttaattgtgccactgacccgctatgtgatggcagaaaccattcgtcagcgccatgttttcccgatgagtagtcagtttcatgttggcattaacgtcgcacccagccattttcgccgtggtgtgctgataaaagatctcaatcagtactggtttagcgctcacccgattcagcaactgatcctcgaaatcaccgaacgcgatgccttactggatgttgattatcggattgcccgcgagctacatcgtaaaaacgtcaaactggcgattgatgacttcggcaccggcaacagttcattttcctggcttgaaacattacgtcctgacgtgctgaaaattgataagtcatttaccgcagctataggttctgacgcggttaactcgacggtgaccgatatcatcatcgcgctggggcaaagactgaatattgaactggtggcggagggcgtggaaacgcaagaacaggcgaagtatttgcgccgtcatggcgtgcatattttgcaagggtatttgtacgcacagccgatgccgctacgtgattttcccaaatggctggcgggcagccaaccgccgcccgcccggcataatggacatatcacgcccattatgccgttacgttaacgcttactcatcttcatcgtgcgccggttgctctttaacaatgcgaaccagatcaacacgataatcattggcttcaatgatggtgatatgcagtggccctacatcaatcacatcgcccacacggggaatgtgaccatttgccgagatcacgaggcccgcgaccgtcgcgatatcatcgtcatcggcaaggtgctcaacatcaagcgcctgctgcaaggcatgcaaatctgtaccgccttttaccagccagccgtcaccatcagtaatgatttccggcgtttcgtcagcgtccgggaattcacccgcaatggcttccagcacatccagcggcgtgaccaagccttgtaccacaccaaactcgttggtcacgataacaaagctcccgcgagcacgacgcagcacgcccagcaggttgatcggatcgagggtttcagggacgataatcgccggagacgccgaagcaatcgccgccacatcaacgccctcttccagcgccaccagcagttctttagcacgtacgattccgatgatttcatccagttcaccgcgacataccgggaacaggctgtgcggtgaggagagcanctgctcgcggatttcatcgaccccgagattagcgtcaacccagcttatttcaccgcgnggcgtcatgatcccgcgcagagaacgcgacgccagcgtcagtacgccgttaatcatgtaacgttcttcttcggcaaatgcaccttccgggatcggcatcggcatcgggttatcggcatcgtgctgaacattggcctgacgtttcccgcccatcaaacgcaggatggcatcggcagtacgcgctcgcagcggcaaagtcgactggtgacgaataaagttgcgacgcgcaatctggttaaacacttcgatgatgatcgagaagccaatcgcggcatacaggtaacctttcggaatgtggaaaccgaaaccttctgccaccagactcagaccaatcattaacaggaagctcagacagagcaccaccaccgtggggtgctggttaacgaatcgcgtcagcggtttggatgccagcaacataaccgccatcgcaatcactaccgccgccatcatcaccggcagatggttaaccatccctactgcagtaattaccgcatccaacgagaagacggcgtcaaggatgacaatctgtgtgacgaccacccagaaactggcgtagcctttaccgtggccggaatcatgatcgcggttttccagccgttcatgcagttcggttgttgctttgaacagcaagaatatccccccgaacaacataatcaggtcgcgtccggagaaggagaaatccatgacggtaaatagcggtttggtcagcgtgaccatccatgaaatcagcgacagcagccccagacgcataatcagcgccagtgataaccccagcaaacgcgctttatcgcgttgttttggcggcagtttgtcagcaagaatggcgatgaagaccaggttatcgatacccagcacaatttcgagaacaacaagcgtgagtagccccgcccaaattgaggggtccattaagaattccatgacaagctcctgcttaaggaatagctattcgacgccagaaataatgcaggcgtaacgacaaaatgcaaacgaaaggtgcggcatagagtgccagaaaggcaggcgttaaaaggcctgatgctgaaatgacgtcggtgacgatccatactgcgggctactgccctatactccatgattgttaaacgggagttaaacatatcagagacgcctctgatttggcaaagatttaccttcctttgcaaacgaatgtgacaaggatattttacctttcgaaatttctgctaatcgaaagttaaattacggatcttcatcacataaaatnnnnttttcgatatctaaaataaatcgcgaaacgcangggtttttggttgtagcccttatctgaatcgattcgattgtggacgacgattcaaaaatacatctggcacnnnngangtnnnnnnnnnnnataaaggaggtagcaagtgaccattgctattgttataggcacacatggttgggctgcagagcagttgcttaaaacggcagaaatgctgttaggcgagcaggaaaacgtcggctggatcgatttcgttccaggtgaaaatgccgaaacgctgattgaaaagtacaacgctcagttggcaaaactcgacaccactaaaggcgtgctgtttctcgttgatacatggggaggcagcccgttcaatgctgccagccgcattgtcgtcgacaaagagcattatgaagtcattgcaggcgttaacattccaatgctngtggaaacgttaatggctcgtgatgatgacccaagctttgatgaactggttgcgctggcagtagaaacaggccgtgaangcgtgaaagcactgaaagccaaaccggttgaaaaagccgcgccagcacccgctgccgcagcacccaaagcggctccaactccggcaaaaccaatggggccaaacgactacatggttattggccttgcgcgtatcgacgaccgtctgattcacggtcaggtcgccacccgctggaccaaagaaaccaatgtctcccgtattattgttgttagtgatgaagtggctgcggatactgttcgtaagacactgctcacccaggttgcacctccgggcgtaacagcacacgtagttgatgttgccaaaatgattcgcgtctacaacaacccgaaatatgctggcgaacgtgtaatgctgttatttaccaacccaacagatgtagagcgtctcgttgaaggcggcgtgaaaatcacctctgttaacgtcggtggtatggcattccgtcagggtaaaacccaggtgaataacgcggtttcggttgatgaaaaagatatcgaggcgttcaaaaaactgaatgcacgcggtattgagctggaagtccgtaaggtttccaccgatccgaaactgaaaatgatggatctgatcagcaaaatcgataagtaacgtattgtgttgattatcagtcagttttcacactttagtcttacgtaaacaggagaagtacaatggagattaccactcttcaaattgtgctggtatttatcgtagcctgtatcgcaggtatgggatcaatcctcgatgaatttcagtttcaccgtccgctaatcgcgtgtaccctggtgggtatcgttcttggggatatgaaaaccggtattattatcggtggtacgctggaaatgatcgcgctgggctggatgaacatcggtgctgcagttgcgcctgacgccgctctggcatctatcatttctaccattctggttatcgcaggtcatcagagcattggtgcaggtattgcactggcaatccctctggccgctgcgggccaggtactgaccatcatcgttcgtactattaccgttgctttccagcacgctgcggataaggctgctgataacggcaacctgacagcgatttcctggatccacgtttcttctctgttcctgcaagcaatgcgtgtggctattccggccgtcatcgttgcgctgtctgtaggtaccagcgaagtacagaacatgctgaatgcgattccggaagtggtgaccaatggtctgaatatcgccggtggcatgatcgtggtggttggttatgcgatggttatcaacatgatgcgtgctggctacctgatgccgttcttctacctcggcttcgtaaccgcagcattcaccaactttaacctggttgctctgggtgtgattggtactgttatggcagtgctctacatccaacttagcccgaaatacaaccgcgtagccggtgcgcctgctcaggcagctggtaacaacgatctcgataatgaactggactaacaggtgagcgaaatggttgatacaactcaaactaccaccgagaaaaaactcactcaaagtgatattcgtggcgtcttcctgcgttctaacctcttccagggttcatggaacttcgaacgtatgcaggcactgggtttctgcttctctatggtaccggcaattcgtcgcctctaccctgagaacaacgaagctcgtaaacaagctattcgccgtcacctggagttctttaacacccagccgttcgtggctgcgccgattctcggcgtaaccctggcgctggaagaacagcgtgctaatggcgcagagatcgacgacggtgctatcaacggtatcaaagtcggtttgatggggccgctggctggtgtaggcgacccgatcttctggggaaccgtacgtccggtatttgcagcactgggtgccggtatcgcgatgagcggcagcctgttaggtccgctgctgttcttcatcctgtttaacctggtgcgtctggcaacccgttactacggcgtagcgtatggttactccaaaggtatcgatatcgttaaagatatgggtggtggcttcctgcaaaaactgacggaaggggcgtctatcctcggcctgtttgtcatgggggcattggttaacaagtggacacatgtcaacatcccgctggttgtctctcgcattactgaccagacgggcaaagaacacgttactactgtccagactattctggaccagttaatgccaggcctggtaccactgctgctgacctttgcttgtatgtggctactgcgcaaaaaagttaacccgctgtggatcatcgttggcttcttcgtcatcggtatcgctggttacgcttgcggcctgctgggactgtaagactgttgtacactaccggggccttttggccccgtttntttatctggaggattaatgacaatcacggacctggtactgattcttttcatcgccgcactcctggccttcgcgatctacgatcagttcatcatgccccgccgtaacggccccaccctgctggcaattcctttgctccggcgtggtcgcatcgatagcgttatcttcgtcggattgattgtcattcttatctataacaacgtcacgaatcatggtgcgttaataacgacatggttattaagcgcactggctctgatgggtttttatatattctggatccgcgttccgaagatcatctttaaacaaaaaggttttttcttcgccaatgtctggattgaatatagccgaatcaaagcgatgaacttgtcggaagatggcgtgttggtgatgcaattagaacagcgtcggctgttaatccgcgttcgaaatatcgacgatctggaaagaatttataaacttctcgtttcaactcaatgagttattaatttagccaaagctatgtttagtgtatttttaataatcagacatagcttaggctatattacctcttcccttatttgttatttattataacgtttcattgatatataaatctaaatgaaaatcgttatcaacaaagcaataaaataatatattccaacagttgttttatattctcaaaatatgttaaggttgcgccctcatttggggagtagccaatttccagattccggaaatgtacgtgtcaacatactcgttgcaaaacgtggcacgtacggactgaagactttcagtcaggcgagaccatatgcacatcaatcgctatgcctgcatgaacgcgaaaacccatcgcggcttgttgttcatgtatgcatgtttgctgggggcgatgatgtgttttatggataccccggtcaggacgttgtcatgaatatcactgctactgttcttcttgcgtttggtatgtcgatggatgcatttgctgcatcaatcggtaaaggtgccaccctccataaaccgaaattttctgaagcattgcgaaccggccttatttttggtgccgtcgaaaccctgacgccgctgatcggctggggaatgggcatgttagccagccggtttgtccttgaatggaatcactggattgcgtttgtgctgctgatattcctcggcgggcgaatgattattgagggttttcgtggcgcagatgatgaagatgaagagccgcgccgtcggcacggtttctggctactggtaaccaccgcgattgccaccagcctggatgccatggctgtgggtgttggtcttgctttccttcaggtcaacattatcgcgaccgcattggccattggttgtgcaaccttgattatgtcgacattagggatgatggttggtcgctttatcggctcaattattgggaaaaaagcggaaattntcggcgggctggtgctgatcggcatcggcgtccagatcctctggacgcacttccacggttaataagaacgctgccagaggtgaatattaaagtccgtctggcagtcgaacacttcttttgctgccagtatttgccagacttctggcttcgcacgccaggcaaacggcgtcatctgcaataatgcgacggcttcatcaccgcgaagacgcatcggataacacaactcatcactcttctgtaatgtaaaaccttccagttgttctgcatgaggtgcatgaagatgtacttcattgtaaatcagccccttcagctccatcaaatgtcgcggtcccggcgtggcagtaatgacccagccgccgggcttcactactcgtgctaattcttctgctttacacggcgcgtaaatacgtattatggcgtccatactggtatcggaaaacggcaaacggtggctggaagcgacacaaagagtgacctgcggatagcgtttcgccgccgcttttatcgctaccttcgaaacatccagaccaaacgtggtgatttcgggcaacgcatcggcaaatgcgtgtgtgtaatacccttcaccacagccaatatccagcaccgccgtggccttttcattaagccgttcccgcagttgggcgacaattgcatcacgcagcggctgataatgtccggcatctaagaatgcgcggcgtgcttgcatcatttccgcgctgtcgcccggatcacgagaccgtttatgctgaacgggcagcagattgacatacccttctttcgccatatcaaactgatgtcgttggggacagatatagctntttttttcacgcgtaagaggctgatggcaaagtggacaggaaaacgacatgacaantccggcaggatactaaaggccgcaagtgtaacgcgaatcacgcggcgggcaaatatccgaacgccaggagcgaagataaagcatagtaaaaagcctcgcattcgacgaggctttatagcgagattgaagcgtattcacacttcagatcagtggattcgatcagatagctgttacgttaacagctgccggacctttctggccgtcctgaatttcgaactcaacgttctgaccttcagccagagttttgaagccattaccctggatagcggagaagtgtacgaacacgtctttgctgccatcagcaggagtaatgaagccaaaacctttagactcgttgaaccacttaacctgacctttaatctttgccatttgaaaaattccttagattgttttcttcgcccgcaggcataacatagataaaactgacacattactgcatgaggcaccaatataaggctcggcagagaagcggtattcaacgtcaacgtgtttactcaggacttctttactgaaaatgccacacataaacagaactgtacctcgtttaacccgaaatctgttatcacatacaacgttaattatggcaagccatttttaaacatgtctcgatcagacgcacaaatctcgatacgtcttccactttttttgcacacttatgcaacggaatacgcgccgatatatcattgtgcttaaccttgtcagttccgcagatacttaaactgacgtagtttctaacatagttcaataagttcagttgttccaggtcagtgggagaagttattacatagtgcgtgcaatatcacattttctgctatgcaatgaataaaaagttatatcactttttctcataaaacaggcagttaacggctctcaatcaccccaaagagaagtcaatcccaaaggaattggaaatttaaaataagaaaaattgatgaataagcaaaaaaaatcaagagagaaacgtttcgctaataaataataccacgcttaatcacaaatccgatgtaaacatcctaataaattaatggggtaaatatctttttctgatatcccgttacgcaaataaataatatgataattatttgaagtcagaccagagttttaatttgaagcagttgcaccatgacagtgcgtataatcaggatgaattgagtaacccttcaacgacggggttactcaagattgaggaaggattatcgttcggcgaccaggcgaataatatcttcgtcttcaaccgatttttgactctcaanggtctttttatctgctttctctggttcgtttgcttcgcacaaacgacgtaacagtgcattttgacgtttttgctgatccagcaacgcctcaagcagttcaatctgttcgttagtccgagaactggcacgattaataaaaaaccacaagatgagcccgataagaagaaccaccaccgatacaaccaaagacgcaatgttcatcacgcctgaatttacaacttcgttcatttcaccacctctgagtagaggcgctattctaccactgctggagaggaagaaaatctagtgctgaaaaaatgatatcaccacgagataaactggttaatggcacaaattccgctgaaaaattgtacatcctgatcgcacatcatgttgaatacctgcgcccaaagcagcaagcaagccaacaccacgacaaccaaaacgacccatcgaaactttttcactccaatctccgtttcacctaccttatgtcattaaactaccatgcgttagttaaacagcgcctaactatgtcgatattcgtgctttttcggaatgagtcgcttgcttcagcgcatattgccgctacgattaagcgaacataaaaaagagaagaggttgtaatgcgattcatcattcgcacagttatgctgatagcactggtatggataggattattactcagcggatatggcgttttgattggaagcaaagagaatgccgcaggattaggtttgcaatgtacctatctgactgccagaggcaccagcacggtacaatacttgcacactaaaagtggttttttggggataacagattgcccgctgttacgcaaaagcaatatcgtggtcgataatggttaagtgtaataaataaccagattctcactcatgagtaaaataattcttatatcaactgcgtttaatctaacgccaccttcaactttatttttctcatgctaaataaagaacctgtctgtttgatattccgacaggttcttactctcatcagaacggatagtcgtgataacccatttgggcagaaattttgcgcgctgcggtatgcaacattgcgacatattcctgtaaacgctcttcagagaaacgcaacgtcgggaaggagatgctcaaaccggcaatgaccacgccaaagcgatcaaataccggaaccgcaatgcatcgcagcccttcttcctgctcttcgttatcttcgccatacccctgctcgcgcacctggtccagaaccggtaataacgcttctgtactggtgatggtccgctcggtactgcgtttatactccacgccctcaagaatttgcttcacttcatcgcgatcgcgccatgccagcagtaccttaccaatcgcggtgctgtacagtggattacgacgcccaatccgtgaatacatgcgcaaattgtacatagagtcaattttgtgaatgtaaacaatactgtnttcgtccagtgcgccgaggtggatagtttctttggtcaggcgggagatctcacgcatctggatatctgcgctacgaattaaatcgacgttttgtaacgcgcgagcgcccagttcaaacaatttcagggtcagggaatatttctccgactccccttcctgcgccacataacctaaggttttcatggtctgtaaaaagcgataaacggtgctttttgacatcatgacgcgctgcgacagctcggttatccctatttcgcgctcttcacccagcgcctgcaaaatgccaaaaacttttagcacggaagatacagaatcaggctgtttatccagatctgcgttagccatttatcacctcattgcgagtgttttataanaatcanaactgttttttattataatttcgcaccagggtggtcgcaatccatcttttgccggttagttacaattctgcgacatccaccgtgaatatcagtgctagaatcatacccctgttgattattcaccaaagatttaaaattcctatgccaaaagttcaggccgacggcctgccattgccccagcgatacggtgcgatattaaccattgtgattggtatttcgatggctgtccttgacggcgcaatcgccaacgtcgccctgccaacaatcgccacggaccttcatgccacgccagccagttccatctgggtagtgaacgcctatcaaatcgccattgtcatctccctgctctcgttttcgtttctgggtgatatgtttggctatcgacgtatttataaatgcggtctggtcgtttttctgttgtcttcactgttctgcgccctttctgattcgctgcaaatactcacccttgcgcgtgtcatacaaggtttcggcggtgcagcgttgatgagcgttaataccgcccttatccgcctgatctatccacaacgttttctgggtagagggatgggcataaactcgtttattgttgccgtctcttctgctgccgggccgacaattgctgcagcaatcctctccatcgcatcctggaaatggttatttttaatcaacgtaccgttgggtattatcgccctgcttctggcgatgcgttttctgccacccaatggttctcgcgccagtaaaccccgtttcgacctgcccagcgccgtgatgaacgcgttaaccttcggcctgcttatcactgcgttgagtggtttcgctcaggggcaatcgctgacgttaattgctgcggaactggttgtaatggttgtcgttggtattttctttattcgccgccagctttctcttccagtaccgctgctaccggtggatttactgcgtatcccgctgttttcactttctatttgcacatctgtttgctctttctgcncacaaatgctggcaatggtttccctgcccttttacctgcaaaccgtgctcgggcgtagtgaagtcgaaacaggtttacttctgacaccgtggccgttagcaacgatggtgatggctccgttggcaggctatttgattgaacgcgtacatgcaggattgctgggtgctttaggattattcatcatggctgcggggcttttttccctggttctgctgcccgcgtcacctgcggatatcaatattatctggccgatgatcttatgtggcgctggatttggcttgttccagtcacccaataaccacaccattattacctccgcgcctcgcgaacgtagcggtggagccagtggcatgttaggaacggctcgtctactgggtcagagtagcggcgcggcgctggtggcgctgatgctaaatcagtttggagataatggtacacacgtctcgctgatggctgcggctattctggcagtgattgctgcctgtatcagtgggttacgtatcactcagccaagatccagggcataaaaaaagcgcgtcgagcaggacgcgctttttagtatttacttcatattacttcaggtattcacccgnacgcagagcttcaatacgtttatccagcggcgggtgagtcataaacaactcactgagcgatttcgacttaccgttaatgcagaaagccatcatgctggttgcttcttgcggttcatagctggttttcaggcgctgcagcgcggcaatcattttctcgcgaccaaccagttttgccgaaccggcatcagcatggaattcacgatgacgcgagaaccacatggtgataatgctcgccagaataccaaacaccagttccagaaccgttgcaaccgcaaagtagatcagcgggttgccgttgctctcttcaccttcatcacgatttccgcccataaaacccgcggcaagctgcgccaggatacgggaaataaagataacgaaggtgttcaccacgccctgaatcagcgtcatggtgaccatatcaccattggcgatgtggctgatttcgtgagcaattaccgcctcggcttcatccgggctcatgttctgcagcaaaccggtgctgacagcaaccagagaggcatcacggcgcgcaccggttgcaaaagcgttgatgtccggcgcatggtagatagccacttgcggcatagcgatccccgcctgacgagcctgggttgctacagtattgaccagccaacgttccctttcgttacgcggttgctcgatcacttccccgccaacagatcgtaatgccatccatttggacatcagaagcgaaacgaaggaaccaccaaaaccgaacagcaaggccatgatcatcagcccctgaacgctgctcgactgtatccctgtcaggctcagtaccagcccgaaaacgaccattacggccaggttcgttagcaggaagagcgcgattcgcatcataattttctttttacctcagtttaacaaaacgcaatatgcgatacccacatcgtatgggttacgcgactattttcaagtctggatagtgcgtaagtcaccagaaagacacaactttacattttgtagcatctgatttacggcatcttgccgctgttaaaaaatcaggcacaatttcttgtgcctgattgatattacttgacgggtgcgggttgttccgcgggtctggctttttcaagcttcgccagatcgagtgcgatattcaccgtctcatccagataaggatccggctcctggtaatctttcggtagatcatccagtttcttcaactccggtttaccttcgcgtttaaagcgttcgttcaaacgcgccaaacgcgtcgcatcatcttcattattctctttctcacgcacagcgtaattcagagaaacgatattgcgcttgtccttcatagcgttgaagcgcgcgatatccttcatgatgttctggaactcaggatctttcgcgatacgcgcattatgttccttcagtagctccggttcaaaggccgttaaatcgcctgatttcacataagtcgcggcatcaatgctatcccacggcagcgcgttatcttcgaatttctcacccgtttccgtttcttcattacccgtcggcatgatgatgtctggcgttacgcctttacgttgcgtactgccgccgttaacgcgatagaatttctggatcgtgtactgcacagaacccagcgctggccattcaggacgtaacatctgatcgtaaatacggttcaatgaacggtattgctgaacggtgcctttaccaaacgtcggttcacccacaaccagtgcacgaccgtaatcctgcattgccgcggcaaagatttctgaagccgaagcactgaagcggtcaaccagtaccaccagcgggcctttatagaaaacctgtccgtcggtatcgctgtcttcacgaactttaccgttgttatcacggacctgaacaataggacccgcaggaataaacagacctgagagcgataccgcttcggtcagcgccccaccaccattgctacgcagatcgatgatcacactgctgacattctgtttttccagtttctgcagttgcactttgacatcgtctgtcaaacccacatagaagccaggaatatccagcacgccgactttctctttaccgacggtcttcaccgacattttaaccgcgcggtcttcgagacgaatacgttcacgggtcaatgttacagtgcgggtcttggtccctttaccagcaggtaaaatttccagacgaactttactgcccttcggccctttaattaaggcaaccacatcatcaagacgccagccaatcacgtcaaccatcggcttgcctgtttgaccaacaccgacaattttgtcaccaacgctgatagctttactcttcgctgccggaccacctgccaccatcgaattgataacggtgtagtcatcatccatttgcagcactgcgccaataccttccagcgacaaactcatttcagtgttgaactgttcggtattacgcggggaaagatagttggtatgcggatcgatttcacgcgcaaacgccgtcattgccagcgagaaaacatcttcgctgttggtttgcgccagacgacgaatggcaaatttgtagcggcgagtcagggtttcacgaatttctttatccgtttttcctgccagcttcaggcttaactcgtcgaatttgactttactgtcccacagcgcgttcaactcagcctcgtttttcggccagggcgctttgctgcggtcaaggttataagtgtcgttgccggtgaaatccatcggcttttccagtaccgacaaagcgtattggtaacgttcaaaacgacgcttttgcgccagattgtagagatcgtagaaaacgtcgagtttgcctgaacgcagttcatcgcctaactcggttttctttttcgcgaactgttcaacatcgcttgccagcagcacgttgtggctgtaatcgagcagattcaggtagcggtcaaagattttggccgaaaatgcctgatcgaggtcgaactggcgataatgagaacgggtgaagcgcgacgttacgcgctcactcaccgtcgcatgctgcgtctcttcctttaataccggaatttgatcagcacgcgtgatatcttctacagcgaaggtctggcctgctattgcaagcaggccagctaacgcggtaagcctaaaaaacatgttcatgcctggcccggcctccgtttcagaacaccaggtgnnctnngcgcacaatcaaagacatacccgaattcagctggacgcggacgccgtctttggtgatttctaatacggtggcatccatcgcgttttgacccgctttcaccttcagggcttgtccgacagtcagagctgaaatgtcagaaactggggtgtgctgttcttcgcgaggtgcttttgctgtttttggcgctttctctaccggcttttgcgcacgaggtttacgttcagcgccttctttgcggcgtggcgtggtcggacgtggcttgcgttcgcgacgcggtgcgtcttctttctcaccagcagctgcggcagcttcgcgttttttcgcttgctgttcagcacgctgtgcctgaacacgcgctttcgcttcttcaagctgcttgcgagcatgctctacatgttgctcgtccagctcaccgcatgggttgccgtcaagatcgacacgcgttgcgccgggtttaacaccgtaaaggtaacgccagctcgaagtgtagagacgtaaagcggatcgtaattgcgttttgctcaggttcatttccccggcaacacgatcgaccaaatcctgaaaaataccgattttcagcggacgcgcttcaccttccgcactgaaacagtggggaaaacgttcggccagaaacgcgattacttctttactgctattcaacttaggttgattttccatgaaatttcctgattacaacggacgtagccaacaagcgcaggcatgaacaggcgtcattataatgacgctatcagtaaatgctacgttatccgttgattatcctgcgacgctcgcaaagaattttttgtaatccgtcgttgcaagcactttttcaagctgtgccacaagctgacgtaagccttgctcgtcctcgtctgtnaagcgaccgaagacggtactatcgatgtcgagaacaccaataatctgatttttcaccaccagcggcagaacaatttcagaattactcgccgcatcacaggcaatatgcccgtcaaacgcatgaacatcctcgatacgctgcacttgattgcgggcaaccgcagtgccgcacacgccacgcccgacgggtatccggacacaggcaattttgccctgaaatggtccgagcaccagtgtatcgtcctcaagcaaataaaaacctgcccagtttacgtcagtgagacgctcatataacaacgcactggtgttcgcaagcgttgccagaaaactggtttctcccgccatcagcgcgttaaagtcgcgnnnnnaatccgcgtaaaattctgttttgttcattatataatcacttggttgtcttacctggaactgccagcctattaaaataagcattaaatgcgttaatgctcaagatcattcccatcatgggttaagattaatgttaattnttattacatttggcacgtcatggctcttaacacaccacaaattacgccgacaaaaaagataacagtgagggcaatcggcgaggaactgccgcgtggtgattaccaacgttgcccgcaatgtgacatgctgtttagcctgcccgagataaattctcatcaaagtgcctattgtncgcgctgtcaggcaaaaattcgtgacgggcgcgactggtcgctaacgcgcctggcggcaatggccttcaccatgctgttgctgatgccgtttgcctggggcgaaccgctgttgcatatctggctgttaggcattcgtattgacgccaacgttatgcaaggcatctggcaaatgaccaaacagggcgatgcgataacggggtcgatggtctttttctgcgttattggtgccccgctcattctggtgacctccatagcttatttatggtttggtaaccgactgggaatgaatctacgcccggtactgctgatgcttgagcgacttaaagagtgggtaatgctcgatatctacctggtcggcattggcgttgcttctataaaggtacaggattatgcccatatccaggcgggtgtcggcttgttctcttttgtggcgttggtgattttaacgacggtgacgttgtcacatcttaatgtcgaggagctgtgggagcgattttatccgcagcgccccgctacgcgtagggacgagaaacttcgtgtctgtcttgggtgccattttaccggctatcctgatcagcgtggtcgctgcccgcgttgtcatattccgctacgcctgcgtcgccgtcatagtctgcaaaaatgctgggcggcgctgttagcgtcaatcgttttattgttacctgccaacctgttgcctatttctatcatttatctgaacggaggacggcaggaagatacaattctttccggaattatgtcgctggcaagtagcaacattgcggttgcaggaatcgtgtttatcgccagtattctggtaccgtttactaaagtgatcgtcatgttcactttactgttgagcattcattttaaatgccagcaaggtttacgcacacgcattctgttactgcggatggtgacctggattggtcgctggtcgatgctcgacctgtttgtcatatctttaaccatgtcgctgattaatcgcgatcagatcctcgcttttactatgggaccggctgcgttttatntcggcgcagcggtaattttgactattcttgctgtggaatggctggacagccgcttactttgggatgcacatgagtcaggaaacgcccgcttcgacgactgaagcgcagattaaaaataaacgccgtatctcacctttctggctgctgccgttcatcgcgctaatgattgccggttggctgatttgggacagttatcaggaccggggtaataccgtcaccatcgactttatgtcggcggatggtattgtcccgggccgtacgcctgttcgttatcagggcgttgaagtcggaacagtgcaggatatcagcctcagcgacgatcttcgtaagattgaagtcaaggtcagcatcaagtccgatatgaaagatgcgctgcgcgaagagactcagttctggctggtgacgccaaaagcatcgttggcaggtgtctccgggctggacgccctcgtcggtggtaactatatcggcatgatgccaggtaaaggtaaagagcaggatcactttgtcgcgctcgatacccaaccgaagtatcggctggataacggcgatctgatgatccacctgcaagctcccgatctcggttcgctgaacagcggttcattggtctatttccgcaagatcccggtgggaaaagtctacgactatgccatcaatcccaataaacaaggcgtggtgattgatgtcctgatcgagcggcgttttaccgacctggtgaaaaaaggtagccgtttctggaacgtttcaggcgttgatgccaacgtcagtatcagtggcgcgaangtgaaactggaaagtctggcggcactggttaacggtgcgattgccttcgattcaccagaagagtcgaaacctgccgaggcggaagatacctttggtctgtatgaagatctggcccacagccagcgtggcgtaataataaaactggaactgccgagtggggccggattaaccgccgactcgacgccgttaatgtatcaggggctggaagtcggacagctgactaaactggatttaaatcctggtggtaaagtcaccggagaaatgaccgttgatcccagcgtcgttacgctgttacgggaaaatacccgcatcgaattacgcaacccgaaattatcccttagcgatgccaatctcagcgccctgctgaccggaaaaacctttgagttggtgcctggcgatggcgagccacgcaaagagttcgttgttgtgccaggcgaaaaagcactgctgcatgaacctgatgttctgacactgaccctgacagcaccggaaagttacggtattgatgctggtcagccgctcattcttcacggcgtgcaggtaggccaggttattgatcgtaaactcaccagcaaaggcgttacctttaccgtcgccattgagcctcagcatcgcgaactggtaaaaggcgatagcaaatttgtcgtcaacagccgtgtcgatgtgaaggtggggctggatggcgttgagtttctcggtgccagcgcctcagaatggatcaatggcgggatacgtattctgccgggcgataaaggtgagatgaaagccagctatccactgtatgccaatctggaaaaagcgctggagaacagccttagcgatttacccaccacaaccgtgagtttgagtgcagagacgctgccggatgtgcaggcaggatcggtagtgctgtaccgtaaatttgaagttggtgaagttattaccgtgcgtccgcgagctaacgcgtttgatatcgatctgcatattaagccggagtatcgcaaccttctgaccaacaatagcgtgttctgggcagaaggcggggcgaaagttcagctgaatggtagtggcctgaccgtacaggcatccccactctccagagcattaaagggagccattagcttcgataacctcagcggtgccagcgccagtcagcgtaaaggcgataagcgtattctgtatgcttccgaaacagcggcccgtgcggttggcgggcagattacgcttcacgctttcgatgccggaaaactggcggtcgggatgccaattcgctatctcggtattgatatcgggcaaatccagacgctggatctgattaccgcgcgcaatgaagtacaggcaaaggcggtgctctatccggaatatgtccagacctttgctcgcggtggtacgcgcttctcagtggtcacaccgcaaatttcggcagctggcgttgagcatcttgatactatcctccagccgtatatcaacgtcgaaccaggccgtggcaatcctcgtcgcgactttgaattacaagaggccaccattactgattcgcgttacctggatggtttaagcattattgttgaagcgccggaagccggttcgttaggcatcggtacgcctgtgctgttccgtggtctggaagtcggtacggttaccggaatgacgctggggacattgtcagatcgcgtgatgattncgatgcgcatcagtaaacgctatcaacacctggtgcgtaacaattccgtcttctggttggcatcgggttacagtctggactttggtctgacgggcggcgtagtgaaaaccggcacctttaaccagtttatccgtggcggcatcgccttcgccacgcctccgggtacgccactggcaccgaaagcccaggaaggcaagcacttcctgttgcaggaaagtgaaccgaaagagtggcgtgaatggggaactgcgcttnnnnaataatgcccactgctccggcgtgcctgcgccggagcgtttatgctaaactgcgcgcctgttttttttgccagtggtatatgctcgtggcccaacacaccgtttatttcccggacgcctttctgacgcaaatgcgcgaagcaatgccttcgacgctctcttttgatgattttcttgccgcctgtcagcgcccgttgcgccgcagcattcgcgttaatacgctgaaaacctccgttgctgatttcctgcgattaaccgctccttatggctggacgcttacgccaattccgtggtgtgaagaaggtttctggattgaacgcgacgatgaagatgcattgccattgggtagtaccgccgagcatttaagtggcctgttttatattcaggaagccagttcaatgttgcccgtcgccgccttgtttgctgacggtaatgcaccacagcgggtgatggatgtcgctgctgcgccaggctccaaaacgacgcaaattgccgcgcggatgaataacgaaggggcaatccttgccaatgagttttccgccagtcgggtaaaagtgttacatgccaatatcagccgctgtggtatcagtaatgttgcgctcacacattttgatggccgcgtgtttggtgcggcattgccagaaatgttcgatgccattttgctggacgctccctgctccggcgaaggcgtggtgcgtaaagatcccgatgcgctaaaaaattggtcaccagaaagcaatcaggaaatcgcagctacccaacgggaactgatcgacagtgcctttcatgcattacgctctggcggtacactggtttactcgacctgtaccttaaaccgggaagaaaacgaatccgtttgcctgtggcttaaagagacttaccccgacgcagtagagtttttaccacttggcgatctcttccctggtgcaaacaaagcgctgaccgaagaaggctttttgaatgttttcccacaaatttacgactgcgaaggcttcttcgttgctcgtctgcgtaaaactcaggccattcccgccttacccaccccaaaatacaaagtgggcaatttcccgttcagcccggtgaaagatcgcgaagccgcacaaattcgtcaggcggctgcaagtgttggcttaaactgggatggaaacctgcgactctggcagcgcgacaaagaagtgtggttgtttccggtaggcattgaagccctgatcggtaaagtccgattttctcgcctggggattaaacttgccgaaacgcacaacaaaggttatcgctggcagcatgaagcggttattgcccttgcctcccccgacaacgagaacgcttttgaactgacaccgcaagaagcggaggagtggtatcgcgggcgcgatgtttacccgcaagccgcgccagtggcggatgacgtgttggttactttccagcatcagccgattggtttagccaaacggattggttcgcgactgaaaaacagctacccgcgtgaactggtgcgggacgggaaactttttaccagtaacgcatgacagcgcacaaaaaaagcgcactttttgactggcacattcggcggcctcaactaggctgaaaaatggtgcgatcggactggtcgtaccacaaccggcagctaaatggagagcacgaagatgaaaaccagtgtgcgcataggcgcttttgaaatcgacgacggcgaattacacggtgaatcgccgggtgatcgaacgttaaccattccttgtaaatcagaccccgatttatgtatgcaactggatgcctgggatgctgaaaccagtatccctgccctgctaaatggcgaacactctgtcctttaccgtacccgttacgatcaacaatctgattcctggattatgcgtcttgcctgatccaaaaagaacccgtcggcatggcgggttatttgtcctggttattcccccgttgtaaaatctctcctaaacttaacggtacggcaccacacttcggggatgaaatgttcgcgctggtactttttgtttgctacctggatggcggttgtgaagatattgttgtggatgtctacaacacggaacagcagtgtctttattctatgagcgatcaacggatccgtcatggcggttgttttccgattgaggattttatagatggtttctggcgaccagcacaggagtatggtgatttttaattattgcaattgcacgaaagtcagttcgcccccaaagacagcgccggtatcaatataatgcaggttgccaatatccacgcgatggcgcaacggtgtatgaccaaaccagaaatgatcagcacctgtaattccctgccctttttggcgttcacttaatcgcgagcggctccacaagacctgatgcaaatcaacgtccttttgccattcataaacatcatctggataatcggcatgagcaataacatgtttgccggtgcggctgtgtacttcaagaataaagggcaaatgctgacatttttccagcgccgttttcgcttgtttctgttgattatctgccagcgcaataaaccagtcgccgccattcatcaaccacaaagacatctgctgggatgccagcgcatccatcgccatctgttcatgattgcctcttaccgcacgaacccaatgttgttccagtaactgcagacaacgtaaactttgcggcccacgatcgataacgtctcccactgagataagtaaatctcgccacggatcaaaacgacaatgccataatttgcggcgcaactgctcaagacaaccgtgtatatcgccagaaagccagatatgtcgccattgatgacccgcaattctctgataaacgggcgcaggctgtttcatcaatattttcctcccgcgctaaagatcacataatcttaacaagaatgttaaaaaacgctggactcagacagtagagtgtgtgttatggttgactataaagtcagcgaaggaaatgcttctggcttttaacagataaaaagagaccgaacacgattcctgtattcggtccagggaaatggctcttgggagagagccgtgcgctaaaagttggcattaatgcaggcttagttgccttgccctttaagaatagatgacgacgccaggttttccagtttgcgtgcaaaatggtcaataaaaagcgcggtggtcatcagcttaaatgttaaaaaccgcccgttctggtgaaagaactgaggcggtttttttattggaaatcaaaaggctattttaggtaattaacagagtttttcagctcgttctataaacggtgccagactcattttttcgccgggattgttgggatcatcaatctgaatcaccgaaatgggttgggctttagtcttcccactggcaacttccttctgtgcgacatcgtttaaaggatactgcacgagggtacttgggttgatgacatacaaagcattacccggtcggcaagtcagcatcacctcttcgcgattaaacgcccatttgtctttacccacttcaaaacggctgacggtaatcacctgcggtgcagccagcgccgctgcagaactggtgagtaacagaaacgccagaatactttttttcatcattttcgtaatccatcaaaaaggttcgagagtcgcaagcaggctgatgatcagcagcactaccgcacctatcgcccattcgagtttagtcatccacacaaaccagggtgccgcacgatcttcatcctgcctcatgcgcggtacaagaacataacgattagccagcgcaatgaccaccataatcatcaccaggatggctttgagcaataagagttggccccagtaagtngtaagcgtggggggaaatccggtaatcaacaatgcattaagcacgccgcttgccagtacgccgatcaccgcaaaatgcccgcaccaggaaaaacgcatcagcgcctgaatagcctggtgtcgccaacggcctttgatgagttgcatacaccagagcaccggcagtaatcccccaaaccacgccgccgcacaaatcaggtgaatcgcgtgattagtctgatggattttcgccgttaccccttcattcagcgtcgcatgccccactcccgccagcagaataaattgcgcggtagtgagcataaacagcaaacgtggcatattccgcggttgcataagggcgacgatcaacgttacgagggcgagaacaatttgccataaccagacgccaccaaactgcgtttgcaaaacagcctgccaaatgtttggcgaaaatacatctttccatcccgttcccatcaacccgccctgaacggcgagcattgcagtggcactgatcaaactccagacggcagcgtgctgttgtaaacgcagaaaacgnttcgtcagcaagcgacgaatcgttaagggtgccagccaggcaccgtacattgcgaagccaaagaccagcatcagcgaggtgaaatggataaatcgcagcgcgatccaggtaaacgccagcatgatttatttcacgctaaaggtgtagtgtcctttcgttttatgcccgtccaccgaaacaacatgccagtcaacggtgtaggttccgggtttcagcgaatcggccagtggaacaatcagtcgcttttggtcctgctcatttcgcttcgccggtaatgttttaatattttcgttttttggccccgtgatttttgcaccactgaatcctgtttcaacaccttccgagaagtttaaagtgattgcctgcggtgcagctgtcacttgcgcgtttgccgcaggatactgatgcgttaaatgcgcatgtgcccagacggaaggtgtcaccaacgaagtggtcaggattgccagcgcgtagcgaagggagcgtgcagttgaagccatattatctattcctttttgtaataacttttttacagagcataaccttgtctaatgtctgagtcgaggatcatcaattccggcttgccatccaggctcactcttagtaacttttgcccgcgaatgatgaggagattaagaatgctgaagaatctggctaaactggatcaaacagaaatggataaagtgaatgtcgatttggcggcggccggggtggcatttaaagaacgctacaatatgccagtgatcgctgaagcggttgaacgtgaacagcctgaacatttgcgcagctggtttcgcgagcggcttattgcccaccgtttggcttcggtcaatctgtcacgtttaccttacgagcccaaacttaaataaaacttatacagagttacactttcttacataacgcctgctaaattatgagtattttctaaaccgcacccannnnnngcagccattttgaaaaggaagtcattatgtcgttntggaaagttgcagcagcgcaatatgagcctngtaaaacctcactcaccgaacaggtagctcatnatntggagttngtgagggccgccgccaggcaacaatgtcagctgttagtttttccatcgctttcttnactggggtgtgattattcgcgacgtgcccttcctgccccacccgatctctcactgttagacccgctttgttatgccgcaacgacctggcgaatgaccatcattgccggccttcccgttgaatataacgatcgctttattcgtggaattgcggtgttcgcaccgtggcgaaaaacgcctgggatctaccatcagagtcatggtgcatgtctgggccgtcgttccagaaccatcacggtggtcgatgaacaaccgcaaggtatggatatggacccgacctgttcactgtttacgacagggcaatgtctgggagaacccgacctgcaggcatcggcccgtcgcttacaatttttttcacatcagtactcgattgctgtgctgatggcaaatgcccgtggtaacagtgcactatgggatgaacatggtcgtctcatcgttcgcgccgatcgtggttcattattgttagtcggtcagcgttcatcacagggttggcaaggcgatatcattccattacgctaggctttttcggcctggagcatgccatgttgcgcattatcgatacagaaacctgcggtttgcagggagggatcgttgagattgcctctgttgatgtcattgacgggaaaatcgtcaaccccatgagccacctggtgcgccccgatcgtcctattagtccacaagcgatggcgattcatcgcatcaccgaagccatggtcgccgataaaccgtggattgaagatgtgatcccacactattacggtagtgaatggtatgtcgcgcataacgccagctttgaccgccgcgtactgcctgagatgcccggtgagtggatttgcactatgaaactggcccgtcgtttgtggccagggatcaagtacagcaatatggcgttatataaaacacggaagctcaatgtacagacgccgccgggcctgcatcatcaccgcgcgttgtatgactgttatatcaccgccgcgttgcttatcgatattatgaacacctccggctggacggcagaacagatggccgatataaccggacgtccgtcgttgatgacgaccttcacctttggcaaataccgtggcaaagcggtttccgacgttgccgaacgcgatccgggctatctgcgctggttgtttaataacctggacagcatgagcccggagctgcgtttaacactgaaacattatctggaaaatacctaatccgcaggcctagcgggtaatgttccctgcgccagcgcgaccagaaaagcatattccatcgctacgccttcgtacgatttaaagcgaccagatttaccgccatggcctgagtccatgtcggtacagagcaataaaagatggttatcggttttcagctcgcgcaacttagcgacccattttgccggttcccaatattgcacctgagaatcgtgtaaaccggtcgttaccagtaaatgtggataagcctgtgcggtgacgttgtcatacgggctgtagcttttcatatactcgtaatattgcggatcctgcggattcccccactcttcaaactcaccagtggtaagaggaattgattcatcaagcatcgttgttacaacatcaacaaacggtacctgggcgataacgccgtggaataattccgggcgttgattaattgcaacgcccatcaacatgccccccgcactcccgcccatcgcataacaaagcgaaggagagccatagcccagttttaacaatgcatcgcaggcatcaagataatcattaaacgtatttttcttcttcagaaatttaccgtcttcgtaccattgttgccccagctcaccgccgccgcgaacatggacaatggcgtagacaaagccacgatctaacaaactcaagcggctaaaactgaaatcggcatcaatacttgcgccgtaagaaccgtagccatacaccagcagcgggttgtgtcctttgtgaaaatgattgcgatggtagaccaacgaaaccggaacttcgacaccatcacgggcgactatccacaggtgttcactgcggtaattcgccgcatcaaaaccaggaacttctgtttgttttaatacacgacgctcaccggtatccatatccagttcaaacaaagtgtctggtgtggtcatggaagaataaccataacgcaatcgcgcggtttcaggttctggattgtaggcaatccaggtcacataggctggatcatcaaaggcaataccaatgacttcccgggtcttgcggttaatttggcgcaaactggttaacccgcgctgacgctcttcaaccaccagccagtcggtaaacagcgtaaacccttccagcatgatgttttcgcgtggcggaattaactcttcccactgttgctcatcacgcatacgggtacggtataagccaaagtttttgccgtggcggttggaacgcagataaaaacgatgctggtagtgatcaaggctgtattcgtgatctttgcggngcggcagaaaaacaaacggctcggcatcggccatttccgcgtccagcaggcgaacttcactggtggtggcgctggccaaatgaatgactacatagtgctttgaggtcgttttatgcaggctgacgtaataggtatcgtctttttcttcgtaaatcagtttatcttgcgatgctggcgtaccgatggcgtgacgccagacctgataaggcagcagcgtcaccggatgcttgcgaacatagtagaaagtccaggagtcatttgcccagacaaagctgggttcaacgttatccagcagttccgggtaccagttacctgtttccagattacgaaaacgaatgccgtactggcgtcgggaaagaaaatcttctgccagcgccataatggtgttatagggcgtaatcgccattccgcccatcgaataaaactcactatgagccgcgcgcttgttggcatcgagcaatatttcccactcgtcccactcttcactgaacgccgattgacgctggtagatagcatattcacagcctggttcataaatatgccganagcggtagccatttttgatgtagggcgcagaaacttctcgttgcggaatgcggtcgatgatttcctttaagatgcgatcctgcaaggcttgttgtgaggccatcacccgatgaccgtaactattttcttgttgcaggtagtccaggacttccggctgagaacgcgtatcgtcccgcagccagtagtaattatcgatgcgcgtatcgccatgaagcgtcatggcgtggggaatgcgggcggcttttggtagcatgttattgttctttctggttgaaacatcttataagggtggcaaaactcaccggggatgcaagcgaaacagggcagtcattgcttagatgatgacaggtaatggcgcgaatatcgaatgttatgcagacagagaaaatcagcctgttcaaatggctgtgctgttctggatagcccgaaatagtcaacttcaggctatccagagagcggaattattccgccaaagtgcgtttttgctgttcgagatcgcgttcaatgccttcacgaacatcctgggggattttcagcgcgtcacccagtgcattcaggtaactgcgttccataaaatggtcaatatcaatagccgcgcagctcaggaaatagatttccagcgcctcttcttcattgcggaccccggtagccaggcgttgtggatccagcggttgttcgattgcctgctcaatgagtacccgcccctgctcttccacgccggcttcacgcaattgctggtcgattgccgcacgttctttggcatcaatatgaccatcacttttagcggcaaagactagcgcaaggatcaaacgttccgtacgctcatccagcggcgtactttgcgagccaaactgcggttcgtcctgatgcgccgcgcgaattttatctttgtatttattccacagcaccgtacccgctaccgctccgccgccaatcagcaacgcgttggtgccatatttcgtaagaagtttacgtgctgatttatttgcgaccagcagtccagccagtccgcctaatgcgcccggcactaaaagtttgcccaatccctgatccgcagacgaggaggtagaagaactgctttgcccaagcagggattgcngttgatttaaccagttagccatatttgctcctcaataaccatttttagtgcctgtagcatagaggatgaggatgtcagaaaatgtatatcgagacaaaagatgcgcaaataagcggggcggtaggccgttattcaaagaaattcgcgccaggtaaggtatttactgtatatcaggtgataagggtattttaggtgaaagtagtttgtcgttttgagtggcattgtttgatgctgattgcccgatgcgacgctgttgcgtnttctcaggcctacgattgtggtgcgttctggggcggacaaggcactcgcgccgcatccgccaacggncaatcgaattatcagaacccattaacgccgntgatattccgccattcccgctttgcagtccacgctgacctggtaatgaatatcggcacttttaccacgtacggttagcggtactgaccatttatcatctttaccctgaatgtcctgcaaactgacccatgccacgggatcggcctgaccgacaattttttgatcatctgcccagcgcgccacgcgattttgttgataatcacgttttacgctcgcggcaattccggcagcatccagaccttcacactttgggaaagtgaccgacttgctggtttcattattggcagcgaaaactgatgcgcaggcngaaaccaacaacagccctnaaaacgcccctctttttttcatgtttttctccatagcacaatgattcaggagaaagcatggtacaaattgtcaggagcgcaagttgcttcaggccgcgtgtgaggcatcttcctcttcggattcagcaccgacgacctgtggggacggtaatttgccggttttcagaatggtgctcagcacatctttttgttctgccagccatagcgaaagggcttcacgttgctcgtcttccatttgcactggagaatttgtcagccaggtgtcaagcagatccgccgtatcaagcattttgtcataagtatcggcttcctttttgctggtaaacgacattttctcttcgccctcacgaatgactacgtatttaacttcaaccgccatttgcagcctctcataataactgtgattttatacagtatatttcttttcggttgagaaatcaacaccagcaataaagacacacgcaaacgttttcgtttatactgcgcgcggaattaatcaggggatattcgttatgacgttattaggcactgcgctgcgtccggcagcaactcgcgtgatgttattaggctccggtgaactgggtaaagaagtggcaatcgagtgtcagcgtctcggcgtagaggtgattgccgtcgatcgctatgccgacgcaccagccatgcatgtcgcgcatcgctcccatgtcattaatatgcttgatggtgatgcattacgccgtgtggttgaactggaaaaaccacattatatcgtgccggagatcgaagctattgccaccgatatgctgatccaacttgaagaggaaggactgaatgttgtcccctgcgctcgcgcaacgaaattaacgatgaatcgcgagggtatccgtcgcctggcggcagaagagctgcagctgcccacttccacttatcgttttgccgatagcgaaagccttttccgcgaggcggttgccgccattggctatccctgcattgtaaaaccggtgatgagctcttccggcaaggggcagacgtttattcgctctgcagagcaacttgctcaggcatgggaatacgctcagcaaggcggtcgcgccggagcgggccgcgtaattgttgaaggcgtcgttaagtttgacttcgaaattaccctgctaaccgtcagcgcggtggatggcgtccatttctgtgcaccagtaggtcatcgccaggaagatggcgactactgtgaatcctggcaaccacagcaaatgagcccgcttgcccttgaacgtgcgcaggagattgcccgtaaagtggtgctggcactgggcggttatggtctgtttggtgtcgagctgtttgtctgtggtgatgaggtgattttcagtgaggtctcccctcgtccacatgataccgggatggtgacgttaatttctcaagatctctcagagtttgccctgcatgtacgtgccttcctcggacttccggttggcgggatccgtcagtatggtcctgcagcttctgccgttattctgccacaactgaccagtcagaatgtcacgtttgataatgtgcagaatgccgtaggcgcagatttgcagattcgtttatttggtaagccggaaattgatggcagccgtcgtctgggggtggcactggctactgcagagagtgttgttgacgccattgaacgcgcgaagcacgccgccggacaggtaaaagtacagggttaaacccggcaaataaacgctacaaaaatgcccgatcctcgatcgggcattttgacttttacagcttagcgccttctacagcttcacgcgccagcttagtaatgcggtcgtaatcgcccgcttccagcgcatctgccggaaccagccaggaaccaccgatgcacagcacgcttttcagcgccaggtagtcacggtagttagccggagaaataccacccgtcgggcagaaacggacctgggagaacggacccgcgatcgcctgcagggctttcacgccgccgttagcttcagccgggaagaatttgaactctttcaaaccgtagtccatacccagcatcagttcggaaacagtgctgatccccggaatcagcggaatagtcccttcggtagcagctttcagcagcggctcggtcagacccgggctaattgcgaactgtgcacccgcttcagtgacttctgccagctgctgtggattcagcaccgtaccggcacccacaatcgcttcaggcacttctttggcgatagcacggatagcgtcaactgcacactcggtacgcagagtcacttccagaacgcgcaccccaccagcaaccaacgcttttgccatcggcaccgcgtgttccagtttttttaccacgataaccggtacaaccgggccggtggtcaggattgattctgcacttgttttccagtttttcatcaganttttctctcgcctgattacaaatttgtcgtcttaaaaagtgatacangttgcgccctgttcggcaccggacagtttttcacgcaaggcgctnaataattcacgtcctgttcccacgcgtgacgcgctcaggtcangaatgtgtggttcgcgagcagccaattccgcttcgtctaccagcagcgtcagttcgcctgtctgtccattcacacgaatgatgtccccgtcgcgcacttttgccagcagcccgccatcgtaagcttctggtgttacgtggatagctgacggcactttacctgaagcgccggagagtcgtccatcggtaactaacgcaattttgaaacaccggtccaataatacaccaagtggcggcatgagtttatgtaattctggcattccgttcgcttttggcccctgatgacggacaacaacgacacaatcgcggtccagcaaacccgcttcaaaggccggcataacgtcatgctggctttcaaaaacaaccgctggcgcttcaatcacctggttctcaaccggcacggcagaggttttcataaccgcacggcccaggttaccgcttaacacttttgtcccaccatgatgagagaaaggttgttcgaaggaagcgatcacattgctgtcgagtgatttttccgccccttcccgccagtccagttcaccattattcagccatggttcaagggtataacgagacagaccaaagcctgccaccgtattgacatcttcatgcagcaggcctgctttgagcagttcacgcaccagaaccggtacgccacctgccgcctggaagtggttaatatcggccggaccgttcgggtagagacgtgccatcagcggtacaacatcagaaaggtcagagaagtcatcccagttaatctgaataccggccgcgcgcgccatcgccaccaggtgcatggtgtggttagtggaaccaccggtcgccagcagtgcaacgataccgttcaccaccactttctcatcgatcatcttaccgatcggcatccattcattaccattaccggtcatgcgtgtaacctgacgcgcagcggcagcggtcaaagcatcgcgcagcggagaatccggatgaacaaaagaagagcctggcaactgcatccccataaactccaccaccatctggttggtgttggcagtaccgtagaaagtacatgttcccggcgcatggtaagacgcggcttctgactccagtaaggccatgcggtccactttaccttcggcataaagctggcgaatacgcactttttctttatttggcaaaccgcttgccatcggtccagacggcacaaacaccgcaggcaaatgaccaaacgacagggctgccatcgtcagacccgggacaatcttgtcgcacaccccgaggaacagagcaccatcaaacatgttatgggacagcccgacagccgcagacatcgctatcacttcgcggcttagcagcgacaattccattccatcctgcccctgggtgacaccatcacacatcgccggaacaccgcccgcaacctgaccaaccgcattcgcttcatgcagggctttacgaatgatttctggatagtgttcataaggctggtgagcggagagcatgtcgttataggaggtgatgatggcgatattgttacgcaacatgcttttcaaagaggctttgtcttctggctggcaggcagcgaaaccgtgtgccaggttaccgcatgccaactgcgaacgatgaacggtcgacgttttcgcttgttctatccgggcgagataagcagagcgagtctcgcgcgaacgttcaatgattcgatttgttacgcgtaacaattgtggattcataaaggctcctgaaattgagttgtcagagcaggatgattcacaacgcgtttcattcagaggatttatgagtgaaacgcctgtaaccggagctcatagggcaaaaacgtttcagtcagtgtaataaaaaaagcctcgtgggtgaatccgcacgaggcctgaaagtgtaaaaattgttctacaatctgtgcaagatcatgttaccggtaaaataaccataaaggataagcgcagatattactcaaactcattccaggaacgaccatcacgggtaatcatcgccaccgaggcaacgggtccccaggttccggcctgatacggtttcggcgcatcattgtccatcgcccacgcctcagtaatggagtctacccatttccaggcttcttccacttcatcgcgacgtacaaacagtgcctgaataccacgcatggtttccagcagcaaacgttcataggcatccgccagatgcgtctgattaaaggtttctgaatagctcagatccagcttggtgatttgcaggttatgtttgtggtcaaggccaggaactttattcagtacctggatatccacgccttcatcaggttgcagacggatagtcagtttattctgcggcagatcctgccacgactctntaaacagattcagttcaggtgttttgaaatagaccacgacttcagaacatttggtcggcagacgtttaccagtacgcaggtagaatggcacaccggcccagcgccagttatcaatgtcgacgcggatcgccacgaaggtttctgtattgctgctcttgttcgcgccctcttcttccagatatcccggcacttttttgccctgggcgaagcccgcagtatattgcccgcgtacggttttttcgcgtacgttggagcggtcgatgcggcgcagagacttcagtactttcactttttcatcgcggatgctgtctgcgctcaggtcagacggcggagacatcgcaatcatgcaaagaatttgcagcaggtggttctggatcatgtcgcgcatctgaccggctttatcaaaatagccccagcgcccttcgatccccacttcttctgccacggtaatctcaacatgatcaatggtgcgattgtcccagttattcacaaacagggagttagcaaaacgcagcgccaacaggttcagcaccgtttctttaccaagatagtggtcgatacggtaaacctggcactcctcgaagtattcgccaacctgatcattgatttcctgcgaggtcgccagcgacgtccccagcggtttctccatgactacgcgtgccggtttagcattcagttttgcctcgccaagccctttgcaaattgcgccaaaagtgctgggcggcatggcaaagtagttaatggtgatacgatttttttgatccagcatcgcgccgagacggctgaatgcagcagtgtcattgacatcgagattacaaaaatccagacgtgcgctcagggtgtcccataaaccttcatcaatggtttctttcatgaaagtttcgagcgcctcgcggacaactttggtatatgccgctttatcccagtcagcacgccctacgccgataatccgggtgtccgggttgagctgaccggctttttccagttgatacagggaaggcagcaatttacgacgcgcaaggtcgcctttcgcgccgaaaatgaccaggtcacaggcctgggctgtttgcgttaccgccatgtcattctccttaagttaactaacccnnnnnntaagccagggtatacttgtaattttcttacggtgcactgtactgcttttacgagcttgcgaaaactgtaaacgcttatccccccgtgcgattacggtaaaagcgcgcaaagtgcggcaaaactgataaaaaaatcatcgttttccattgggtaaaaatctgacactgatcatgttatgaaaaaaaataacaacttttttatctgcttttgtcattaacacagcacacaggcgtaatatctgacaaaactgcatttcgatttctttcagtgcggaaatcgtcattacccgtgagtctctttacatcatgaatatgctggaaaaaatccagtctcagctggaacatttgagcaaatcagagcgcaaagttgccgaggtcattctggcttcgcccgataacgcgatccattcgagtattgctgctctggcactggaagccaatgttagcgaaccgacggtgaatcgtttctgtcgcagcatggacacgcgcggttttcctgattttaaacttcatctggcacagagtctggcgaatggcactccctatgttaatcgcaacgtcaatgaagatgacagcgttgaatcatacacagggaaaatatttgagtccgcaatggcaacgctcgatcatgtccgtcattcactggataaatctgccatcaaccgcgccgtcgacttgctcactcaggcaaaaaaaatcgcctttttcggattaggctcttcagccgccgttgcccacgatgcgatgaataagttctttcgttttaatgttccggtggtgtactccgatgatattgtgctgcaacgcatgagttgtatgaattgtagcgacggagacgtggtggtgctgatttctcacaccggaagaacaaaaaatctggtcgagctggcgcagctggcacgcgaaaacgacgctatggtgattgccctcacctctgcgggtaccccgctcgcccgggaagcaacgctggcaattaccctcgacgtaccggaagatactgacatttatatgcccatggtttctcgacttgcacagctgaccgtgatagatgtgctggcgacaggatttactttgcgacgcggtgcaaaattcagagataacttgaagcgggtcaaggaagcgctgaaggaatcgcgttttgataagcagttacttaatttaagtgacgatcgctaaaagcgactgtcactgttctaatcttatacgacatccgaatgagattattttatcgccatcgcggcgttatttcattcggatttcatgttcaagcaacacctggttgtttcagtcaacggagtattacatgtccagaaggcttcgcagaacaaaaatcgttaccacgttaggcccagcaacagatcgcgataataatcttgaaaaagttatcgcggcgggtgccaacgttgtacgtatgaacttttctcacggctcgcctgaagatcacaaaatgcgcgcggataaagttcgtgagattgccgcaaaactggggcgtcatgtggctattctgggtgacctccaggggcccaaaatccgtgtatccacctttaaagaaggcaaagttttcctcaatattggggataaattcctgctcgacgccaacctgggtaaaggtgaaggcgacaaagaaaaagtcggtatcgactacaaaggcctgcctgctgacgtcgtgcctggtgacatcctgctgctggacgatggtcgcgtccagttaaaagtactggaagttcagggcatgaaagtgttcaccgaagtcaccgtcggtggtcccctctccaacaataaaggtatcaacaaacttggcggcggtttgtcggctgaagcgctgaccgaaaaagacaaagcagacattaagactgcggcgttgattggcgtagattacctggctgtctccttcccacgctgtggcgaagatctgaactatgcccgtcgcctggcacgcgatgcaggatgtgatgcgaaaattgttgccaaggttgaacgtgcggaagccgtttgcagccaggatgcaatggatgacatcatcctcgcctctgacgtggtaatggttgcacgtggcgacctcggtgtggaaattggcgacccggaactggtcggcattcagaaagcgttgatccgtcgtgcgcgtcagctaaaccgagcggtaatcacggcgncccagatgatggagtcaatgattactaacccgatgccgacgcgtgcagaagtcatggacgtagcaaacgccgttctggatggtactgacgctgtgatgctgtctgcagaaactgccgctgggcagtatccgtcagaaactgttgcagccatggcgcgcgtttgcctgggtgcggaaaaaatcccgagcatcaacgtttctaaacaccgtctggacgttcagttcgacaatgtggaagaagctattgccatgtcagcaatgtacgcagctaaccacctgaaaggcgttacggcgatcattaccatgaccgaatcgggtcgtaccgcgctgatgacctcccgtatcagctctggtctaccaattttcgccatgtcgcgccatgaacgtacgctgaacctgactgctctctatcgtggcgttacgccggtgcactttgatagcgctaatgacggcgtagcagctgccagcgaagcggttaatctgctgcgcgataaaggttacttgatgtctggtgacctggtgattgtcacccagggcgacgtgatgagtaccgtgggttctactaataccacgcgtattttaacggtagagtaagtacgttgccggatgcggcgaaaacgccacatccggcctacagttcaatgatagttcaacagatttcgaatattctgaagcaaacttgaacttatcatcaggcgaaggcctctcctcgcgagaggcttttttatttgatgggataaagatctttgcgcttatacggctggatttcgcccggtttgcgagttttcagcaattttagtatccaggtgtattgttctggtcgcggaccaacaaaaatctcgacttcttcattcatccgccgcgcaatcgtatgatcatccgcctctaacagatcatccatcggtgggcgcacctgaatcgtcagacgatgcgtcttgccatcataaatcggaaacagcggtacaacgcgcgcacggcacactttcatcaaacgaccaatcgcgggcaacgtcgctttataggtggcaaagaaatccacaaattcgctgtgctctgggccatgatcctgatcgggtaaataatatccccagtacccctgacgtaccgactggatgaatggtttaataccgtcatttctcgcatgcagacgaccgccaaagcgacgacgcaccgtgttccagacataatcaaaaaccgggttgccctgattatggaacatcgctgccattttctgcccttgcgaggccatcagcatggcaggaatatcgacggcccaaccgtgcggcactagaaagataactttctcgttattacgccgcatctcttcgatgatctccagcccttgccagtcaacgcgcggctgaattttctccggcccgcgtattgccaactcagccatcattgccatcgcttgcggcgcggtggcaaacatctcatcaacaatcgcttcgcgttcagcttcactacgttctggaaagcagagcgacagattgattaacgcacgacggcgtgagctttttcccagtcgtccggcaatacgtcccagccgtgccagaatgggatcacggaactttggcggcgttaaagcgatacccgccatcgctgctacgcccagccatgctccccagtagcgcgggtggcgaaaggatttatcaaactcaggaatgtattcgctattattttttttcgtttccatgcttttccagtttcggataaggcaaaaatcaatctggtgatagtgtagcggcgcaacttgccccgcaccaaataaaaaaagccggtactgactgcgtaccggctgcgaatggatgttaattaatcaaaccgtagctgcggcacaatctctttggcctgcgccaggaattcgcgacgatcggagccggtcagccnttcggtacgcggcagttttgccgtcagcgggtttacggcctgctggtttatccatacttcatagtgcagatgcggcccggttgaacgtccggtattaccggaaagcgcgatacggtcgccacgtttcaccttctgccccggtttcaccagaatcttgcgcaagtgcatataacgcgtggtgtagctgcgaccatgacgaatagccacataataacctgctgcgccactgcgtttggcaaccaccacttcaccgtcacccactgaaagcactggcgtaccctgcggcatggcgaaatcaacacctctgtgtggtgcaacgcgaccggtcaccggattagtacgacgcgggttaaagttagacgagatacggaactgtttcgccgtcgggaatcgcaagaatcctttcgccagaccagtaccgttacgatcgtagaatttgccatcttcagcgcggatagcgtaataatctttaccttctgaacgcaaacgtacgcccagcagctggctttgctcacgtttaccatcaagcatttctcgagacattaataccgcaaattcatcgccttttttcagtttgcggaaatccatttgccactgcatggctttaatcactgcgctcacttcggcgctggtcaaaccggcgtttctggcgctggcaacaaagctccccccgacggtacctttcagcagattgttaacccactctccttgctgcatttcgctggtcattttaaaaccgttagcggcagtacggtcataggttcgggtttcacgacgagacacttcccaggtgaggcgctgcagttcgccgtccgcggttaatgtccaggagagttgttgaccgattttcaggttacgcaattctttgtcggccgcagccagttgggtgatatcacccatatcaataccatactgattgagaatgctgcttagcgtatcgccagtggaaacaacatattcatgcacgcccgcttcaccggcgattttgtcatccagttcgtcctggggaatggcttcatcttcttgtgcagcttgatcaatcggctcactggcttcaggtaagagcgaacgaatttcgttctgttccagctcaatggttttgacaattggcgtggcatcgcggtgataaacatagggccgccagacagcgacggccagagtaagaacggtgagcgaccccaacataacgcggtgtggtcgcggtaaattattaaacgccagggcgacagagcgggctatctgttgcacgtaatcacttcctcattaatctcctttcaggcagctcgcatactggttggctaaatgactcaggaattctgaatagcttgttttacccagtttgatattcgtccccaggggatccaacgttcccatacgaacggatgtccctcgtgcgacgctctcaacgaccgctggcctgaactgtggctcagcaaaaacgcaggttgctttttgctcaaccaactgtgttcttatttcatgtaaacgctgcgcgccaggttgaatctcagggttaacggtaaaatgaccaagcggtgtcagtccgaactgtttttcgaaatagccgtaagcatcgtgaaaaacgaaataacctttccccttgagcggcgcgagctcgttaccaacctgcgtttcggttgaggctaattgtgcctcaaaatccttcaggttggcgtcaagtttggctcgactttgcggcataagttccactaattttccatggattgcaaccgctgtagcccgcgctatctctggggaaagccaaagatgcatgttgaaatcgccgtgatggtgatcttcgtcacttttttccgcgtggtcgtgatcatcatcatcgccgttaatacttttcatcagtagcggtttcacatcttcaagctgcgcaatcgttacctgcttcgcttctggtaatttgcttaccggtttttgcataaacgcttccatctccgggccaacccaaacgactaagtccgcgttctgtaagcgttttacatccgatggacgcagtgaataatcatgttctgaagcgccgtcaggaagtaaaacctccgtttctgttaccccatcagcaatggcagaagcgatgaacccaacgggtttaagcgaagcgacaacggcggcatctgcggcctgtgttgcaccgccccagagagcggcgaataatgctgcgaaaagaagcgtttttttatgtaacataatgcgaccaatcatcgtaatgaatatgagaagtgtgatattataacatttcatgactactgcaagactaaaattaacatgacaagtctggtttccctggaaaatgtctcggtttcttttggccaacgccgcgtcctctctgatgtgtcgctggaacttaaacctggaaaaattttgactttacttgggccaaatggcgcaggtaagtcgacactggtacgggtagtgctcgggctggtaacacccgatgaaggggttatcaagcgcaacggaaaactgcgcatcggctatgtaccgcagaagctgtatctcgacaccacgttgccactgaccgtaaaccgttttttacgcttacgccctggtacacataaagaagatattttgcctgcantgaaacgtgtccaggccgggcacctgattaacgcaccgatgcaaaagctctctggtggcgaaacgcagcgtgtactgttagcgcgagcattgttaaatcgcccgcaattattagtgctggatgaacccactcaaggcgtggatgtaaatggccaggtggcgttatatgaccttattgaccaactgcgtcgtgaactggattgtggcgttttaatggtttctcacgatcttcatctggtgatggcaaaaaccgatgaagtgctgtgcctgaatcatcacatttgttgttccggcacaccggaagttgtttccctgcatccggagtttatttcaatgtttggtcctcgtggtgctgaacaactgggtatctatcgccatcatcataatcatcgtcacgatttacagggacgaattgttttgcgtcggggaaatgatcgctcatgattgaattattatttcccggttggttagccgggatcatgctcgcctgtgccgcgggtccgctgggttcgtttgtagtctggcgtcgtatgtcttatttcggtgatacgctggctcatgcctcattacttggtgtcgcgtttggtttgttgctggacgtgaatccattctatgcggtgattgccgttacgctgctgctggcgggcggtctggtatggctggagaagcgtccacagctggcgatcgacacgttattagggattatggcgcacagtgccctgtcgctgggcctggtggtcgttagtctgatgtctaacattcgtgttgatttgatggcttacctgttcggtgatttactggcagtgacgccagaagatctcatctctattgcaattggcgtggtcatcgtggtggctattttgttctggcaatggcgcaatttgctgtcgatgacgattagcccggatctggcgtttgttgatggtgtgaaattacagcgagtgaaattgttgttgatgctggtgacggcattgacgattggtgtagcgatgaaatttgtcggtgcgttgattattacttcgttgctgattattcctgcagctactgcgcgtcgctttgcccgtacgccggaacagatggctggtgtcgctgttttggtggggatggtggcagtaactggcggtttaaccttttccgcgttttacgatacgccggcgggtccgtcggtggtgctatgtgcggcactgttatttattatcagtatgatgaaaaagcaggccagctaatctatcgctgaacacatttgtcggatnnggnnnnnnnnnnttatccgacctacggttcgctatctctggtaggcctggtaagacgcgaacagcgtcgcatcaggcacactgccaatgtcggatgcggcgcgagcgccttttccgacctacggttcgctatctctggtatatgcctgataagacgcgaatagcgtcgcatcaggcacactgccaatgtcggatgcggtgcgagcgaccaatccgacttacggcatttctggcggcgttatgccaaagtgattccacgcccgcgtcgtcgccatacgcccacgcggtgtacgctgcaaaaagccttgctgaatcaaataaggttccagcacatcctcaatggtttcacgttcttcgccaatggctgccgcaaggttatccagacctaccggcccaccaaagaacttatcgattaccgccagcaacaatttgcggtccatataatcgaaaccttcagcatcgacattcaacatatccagcgcctgagcagcgatatctgccgagatggtgccatcgtgcttcacttcggcgaaatcacgcactcgacgcagcagacggttggcaatgcgcggcgtaccgcgagcgcgacgagcaacttccagcgcgccgtcatcactcatctcaagccccataaagcgtgcgctgcgactgacgatatattgcagatccggcacctgataaaactccagacgttgcacaataccaaaacggtcgcgcaacggtgatgtcagcgaacctgcgcgcgtggttgcaccaatcagggtaaacggcggcaaatcaattttaatggagcgtgccgccggaccttcaccaatcatgatatccagttggtagtcttccattgccgggtacagcacttcttcaacaactggcgataaacggtggatctcatcaataaacagcacgtcatgcggttcaaggttagtgagcatcgcagccaaatcgcccgccttttccagcaccggaccagaagtcgtgcgtaaattaacgcccatttcattggcgacaatgttggcaagcgtagttttacccaaccccggaggaccaaaaatcaacaaatgatcgagggcatcgccgcgcagtttcgctgctttgatgaaaatctccatctgtgaacgaacctgcggctgaccaacatactcttccagtaatttagggcgaatggcgcgatctgctacatcttccggcaaagtggtaccggcagaaatcagacggtctgcttcaatcatcctttacctcataacgcggcgcgtagggcttcgcgaattaatgtttcactgctggcgtcagggcgagcgattttgctcaccatgcggcttgcttcttgtggtttatagcccagcgccaccagcgcggcaaccgcttcttgttcagcatcgtcggtcgccgggctggcaggagacgtgagtaccaggtcggcggctggcgtaaagagatcgccatgcaaacctttaaatcggtctttcatttcaacaatcaagcgttcggcggtttttttgccaatacccggcagtttcaccagtgcccccacttcttcacgctcaacggcattaacgaactgctgcgctgacattccggagaggatcgccagcgccaacttcgggccgacgccgttggttttgatcaactctttgaacaacgtgcgctcttgtttattgttaaaaccgtacagcagttgcgcgtcttcacgcaccacaaagtgggtgaaaacgatcgcttcctgacccgcttcagggagttcataaaaacaggtcatcggcatatgcacttcatagcctacgccgcccacttcaattaacaccagcgggggttgtttttcaatgatgatgcctctgagtctgcctatcacatgacgctcctgcgtaatgaatcaaagataatgctgtatgataaaaaaatgctggatagatatccagcgaaggatgaagaaaacttgcgaggtgtctcgatgaactgaaaaatggcacagtataatttattctacaggttatattggaagtaaatattttaatattacatattcagtgaagaaatgcgtaataaaaatatacattgcgcctcctgnnnnnntaaattttttatgctattacgtatattcgtatctatttcaatggaatgacaacgtgaatattaattaccctgctgaatatgaaattggagataacgtctttacatgtataggtgctgccttatttggtcaaatatcagctgcatcaaattgctggagtaatcacgtcgggatcattatcggtcataacggtgaagacttcctggttgcagaaagccgggttcccctttcaaccatcaccacgctatctcgttttattaaacgttcgtctaatcaacgctatgctataaagcgattagacgctgggctgacagaacaacaaaaacaacgaattgttgaacaggttccctcccggctacgcaaactttaccacaccggttttaaatacgaatcttcgcgccagttctgttcaaaatttgtttttgatatttataaagaagcgctatgtattccggtgggtgaaatagagacgtttggagaattgttaaatagcaatccgaatgcaaaactcactttctggaaattctggttcctgggttctattccgtgggagcgtaaaaccgtcacgccagccagtttgtggcatcatccaggtttggtgttgattcatgcggagggagtggaaacgcctcagccggaactgaccgaggcggtataacttaacgcagtcgccctctcgccaggttcagccgcgattcgctcatctgcatcgcattctgactaacgtggcagtgggtgatggcaatcgccagcgcatcggcggcatccgcctgtggattagcgggcagtttcagcaaggtgcggaccatatgctgcacctggcttttttcggcactaccaatacctaccaccgtttgctttacctgacgtgccgcgtattcaaatactggcaactcctgattcaccgccgccacaatcgccacgccgcgcgcctggcccagtttcagggctgagtcagcgttctttgccataaagacttgttcaatggcgaaataatcgggctggaactgggtgatgatttccgtcacgcccgcatagatgagtttcagacgagacggtaaatcatccactttggtgcgtatgcatccgctacccaggtaggacagttgcctacctacctggcggatgacgccgtagccggtcacgcacgaacccggatcaatgccgagaataatagccatcacgcgtctccgttttgctgtttagcaggcctcatcagagagtcgctgcgacctcatcagagatttcaccgttatggtaaacttcctgcacgtcgtcgcaatcttccagcatatcgatcagacgcatcagtttcggtgcggtttctgcatccatatcagctttggtagacgggatcatggaaacttccgcgctgtctgctttcagacctgccgcttccagagcgtcgcgcactttacccatttcttcccatgcagtgtagacatcaatcgcgccgtcatcataggtcacaacgtcttcagcacctgcttccagtgctgcttccatgatggtgtcttcatcgcctttctcgaaggagatgacgccttttttgctgaacagataggctacggaaccatcagtaccgaggttaccgccacatttgctgaatgcatgacgcacttcagcaacggtacggttgcggttgtcagacagacattcaatcatgattgccgtgccgccaggaccgtaaccttcgtagatgatggtttccatgttcgcatcatcatcaccgcccacaccacgtgcaattgcgcggttcagagtgtcacgggtcatgttgttagacagtgctttatcaattgctgcacgcagacgcgggttagcgtccggatcgccaccgcccagcttagccgcggttaccagctcacgaatgattttagtgaagattttaccgcgcttagcatcctgcgcagctttacgatgtctggtgttggcccatttactatgacctgccataaaaatatctccagatagccctgcctgttcaggcagcgttaattacaaactgttcaatcgcctgccggttgctccaggacttagtgagcgccgccgcagcaggcgcatcaagccacttgtaagccagatgttcagtgaaaacgatctgccgctcatgcggaagcgcaagacagaaccatgattccgtattacgcgtcacgcccggcgcatagcgatgacgtaaatgagaaaaaatttcaaactctaccgtgcgctgacagtcaattaaggtcagttgttcagcgacaacatcaatggtgacctcttcctttacttcgcgcatggcagcttgcggcgcggtttcaccctcttccacgctgccggttaccgactgccagaaatcggggtcatcacgccgctgcaacatcagcacccgtttcgtatcttgtgcgtagatgaccactaagatcgaaacgggacgcttatacactttatccttcacgctgcctcttcgttgactgccttcgctcatcccattcacatagttatctatgctcatgggagttcactcagttgccgcctcgatgcaacgcgaatgatttcgtgtatttgagtcatatcagttattctcagccttcttcacaacntgaatgctcagctcagccagtgcagccgggttagcaaagctcggtgcttcagtcatcagacacgctgccgccgtggttttcgggaaggcgataacgtcacggatattgtcggtgccggtcagcagcatggtcagacggtcaagaccgaatgccagacctgcgtgcggcggagtaccgtatttcagagcgtcgagcaggaagccgaatttctcgcgctgttcctcttcgttgatacccagaataccaaacaccgtctgctgcatatcaccattatggatacgtactgaaccaccgcccacttcgtaaccattgatgaccatatcgtaagcgttcgccaccgcattttccggtgcagctttcagctctgcagccgtcatgtctttcggtgaggtgaacggatggtgcattgccgtcaggccgccttcaccgtcgtcttcaaacatcgggaagtcgataacccacagcggtgcccatttgctttcgtcggtcagaccaaggtctttacccactttcaggcgcagtgcgcccatcgcgtcggcaacaattttcttgttgtcggcaccgaagaaaatcatatcgccatcttgcgcggcagtacgatccaggatggcttcgatgatttctgcattaaggaacttcgctaccgggctgttgataccttccagacctttcgcgcgttcgttaactttgatgtaagccagacctttcgcgccgtagattttaacgaagttaccgtattcgtcgatctgcttacgggtcagcgatgcgccacccggaacacgcagagcggcaacgcgacctttcggatcgttcgccggacctgcaaatactgcaaactcaacagatctcagcagatcagcaacgtcggtcagttccatcgggttacgcagatccggtttatcagaaccataacggcgttcggcttccgcaaaggtcattaccgggaaatcgcccagatctacgcccttcacttccagccacagatggcgcaccagcgcttccatcacttcacgcacttgcggcgcggtcatgaaagaagtttccacatcgatctgagtaaattcaggctgacgatcagcgcgcaggtcttcgtcacggaagcatttaacgatctgatagtagcggtcaaagccggacatcatcagcagctgtttgaacaactgtggggattgcggcagtgcgtagaatttacctttgtgcacacgagaaggcaccaggtagtcacgcgcgccttccggcgtggctttggtcagcatcggagtttcgatgtcgaggaaaccgtggtcatccataaaacggcgcaccaggctggtgattttagcgcgggttttcaggcgctgagccatttccggacgacgcaggtcgaggtagcggtntttcagacgcgcttcttcggtgttgacgtggttagagtcaagcggcagaacatctgcgcggttgatgatagtcagcgaggacgccagcacttcgatttcgccggtcgccatatcgcggttaatatttttttcgtcacgcgcacgtacggtgcccgtgacctgaatgcagaactcattacgcagttcagaggccagctttaacgcgtccgcacgannnngatcgaaaaatacctgcacgataccttcgcggtcgcgcatatcgatgaagatcaggctaccaagatcacgacgacggttgacccaaccacacagagtcacctgctgccccacgtgggacaaacggagctgtccacaatattctgtacgcatgagatatcccttaacttagctgccggcggatgccccctgctgcgcaggtgaccaagtcgcagcgttagctgtatgtcacaactgaatgaaaaaaggcggctattatactggaaattctgccgcaccgtaagagcctggcccgcgctggaacgcctcgttaccactttatatcgggcctgaaatcagactctacgccagtttgctataaaggtgttgcccgaactcataaaaattaanaaaatttgtcgttccgccatcggctaatcgcattaaggtgtgaggcacgattttgttttttcaggagtcatcatgcttgaacttaatgctaaaaccactgcgctggtggtgatcgatttacaagaaggcatcttaccttttgccggtggtccacatactgccgatgaggtagttaatcgcgccgggaagctggcggcgaaatttcgcgccagcggtcagcccgtgtttctggtgcgcgttggctggtctgccgattacgccgaagcattaaaacagccggttgatgccccttcccccgctaaagtgttgcccgaaaactggtggcaacatccagctgcattaggtgcaactgacagtgatatcgaaataatcaaacgtcagtggggtgcgttttacggtacggatctggagttgcaattacgccgccgaggtatcgatacaatagtgttatgtgggatctcgaccaatatcggagttgaatccaccgcccgcaatgcctgggaacttggctttaatctggtgattgccgaagatgcctgtagtgccgctagcgccgagcagcacaataacagtatcaaccatatctacccgcgcatcgcccgtgtgcgtagcgtggaagagatcctcaacgcgttatgatttacatcggtctaccgcaatggtcgcatcctaaatgggtgcggttggggatcaccagccttgaagagtatgcccgtcactttaactgcgtggagggcaacaccacgctttacgccctgccgaaacccgaggttgtcctgcgctggcgtgaacagaccacagatganttccgcttctgttttaagtttccggcgaccatttcgcatcaggcagcattacgacattgcgatgatttagtgactgaatttttgacccgcatgtcaccgttggctccgcgcattgggcaatactggctgcaactgcctgccacnttcggcccacgggagctgcctgcgctttggcattttctcgattctctccctggcgaatttaattatggtgtggaagtccgccatccacagtttttcgccaaaggggaagaggaacaaacgcttaatcgcggtttacatcagcgcggcgttaatcgggtgattttagacagccgcccggttcatgcagcacgtccacacagtgaagctattcgcgacgctcaacgaaaaaaacctaaagttccggtacatgctgtactgacggcgacaaatccgctgatccgttttatcggtagtgatgatatgacgcaaaaccgggaattatttcaggtctggttacaaaaattagcgcagtggcatcagaccactacgccttatctttttttacatacgccagatattgcccaggccccggaactggtacataccctgtgggaagacttacgtaaaacgcttccagagatcggagcagttccggctattccacagcaatcttctcttttctgaatttgccacctatcatagacaggtgccatcggccattttaaagggagtttgtatggtaagcgcgctgtatgccgttttaagtgcgttgttattaatgaagttctcttttgatgtcgttcgcctgcgaatgcagtaccgcgttgcctatggtgacggtggttttagcgaactgcaaagcgctattcgcattcatggtaacgcggtggaatatattcccatcgcgattgtgctgatgctgtttatggaaatgaatggcgcagaaacctggatggtgcatatttgcggcatcgttttgcttgctggtcgtctgatgcattattacggttttcatcaccgtctgttccgctggcgacgttccggcatgagcgccacctggtgtgcgctgttgctgatggtgctggcgaatctttggtatatgccctgggagttggttttctccctgcgttagcgcacaatacgccactttctttttcccggatttttacgttatgtctcaccgcgacacgctattttctgcccctatcgccagactgggcgactggacctttgatgaacgggtagctgaagtcttcccggatatgatccagcgttccgttcccggctattccaatattatttccatgattggtatgttagccgagcgcttcgttcaacctggtacgcaggtttacgatctgggttgttctctgggcgcggcgacgctctcggtgcgtcgcaacattcatcatgataattgcaaaattattgccatcgacaactccccggcgatgattgaacgctgccgtcgtcatattgacgcctataaagcccctacgccagtagacgtcattgaaggtgatattcgcgatatcgccattgaaaacgcatcgatggtggtgctgaattttaccctgcaattcttggaaccttccgagcgccaggcgttactggataaaatttatcaagggctgaaccccggcggcgcgctggtgctttcggaaaaattcagtttcgaagatgccaaagttggtgaactgttgttcaacatgcaccacgactttaaacgtgccaacggttacagcgaactggagatcagccagaagcgcagcatgctggaaaacgtgatgctgaccgattccgtggaaacccataaagcacgcctgcataaagccggttttgagcatagcgagctgtggttccagtgctttaactttggttcactggtggcattaaaagcagaggacgctgcatgatcgactttggtaacttttattctctgattgccaaaaatcatctttcacactggctcgaaacgctgcccgcgcagattgctaactggcagcgcgagcagcagcacgggttgtttaagcagtggtcaaatgcggtggagtttctacctgaaattaaaccgtatcgtcttgatttattgcatagcgttacggcagaaagcgaagagccactgagcgcagggcaaattaaacgcattgaaacgctgatgcgcaacctgatgccgtggcgcaaagggccgttctcactgtatggcgtcaacatcgataccgaatggcgttccgactggaaatgggatcgtgttctgccccatctttctgatttaaccggacgcaccattctggatgtcggctgcggcagcggttatcacatgtggcgcatgattggcgcaggcgcgcacctcgcggtggggatcgaccctacgcaactgtttctgtgccagtttgaagcggtgcgtaaactactgggtaatgatcagcgcgcgcatttgttaccgttaggtattgaacaacttccggcactgaaagcctttgataccgtcttttcgatgggcgtgctttatcatcgtcgttcaccgctggagcatctctggcagttgaaagatcaactggtcaatgaaggtgaactggtgcttgaaacgctggttattgatggcgatgagaacacggtgctggtgccgggcgatcgttacgcgcaaatgcgtaatgtctatttcatcccttccgcgctggcgctgaaaaactggctgaagaagtgtggttttgtagatatccgcattgcggatgtgagcgttaccactacagaagagcagcgacgcactgaatggatggttaccgagtctctgtccgatttcctcgacccacatgatccgagtaagacagttgaaggttatcctgcgcctaaacgcgcggnnnngattgcncgcaagccgtaaaggtctggtattactgccggatgcggcgtgaacgccttatccannnnnnaaaaccttgntaattcaatatattgcagggactatgtaggcctgataagcatagcgcatcaggcagctttatgtttgcataacctcagcgcccgtttccgggcgcttttcacgtcttatgcctgaacagctggctgatcaaacgccgttaacttcggtgcgttacccgtatatttttcgatatacaccagcgcagagttaccggcacaggcatttgccagctgcgagctggggatatccgccgttaacacgttcgcactgccgtttttacacaagccattttccagatctggccatgcaccttcatgcacgcataccacgccttttttgatcccgtcagtcaccacagcgcctgtcaaaatctgaccacgtttgttccagacacggaccagatcgccattcgcaataccaaagcgagcagcatcttcggtgtgaatagtgattggttcacgatcggcaaccgcatatnttttacgcagttgcgcatagttaagctgactgtgtaaacggtgtgccggatgtgcggtcagaagctgtaactgcttctcgtcggcggtacctttccactcatcaggcgcaagccaggttgggtgtgccgggcaatccttatagccaaatttttccagcgttttggagtaaatctcaattttgccgcttggcgtacccagcgcatttttcaccggatcggcgcggaaatcaccataacgaacgtactgttcgttcttctcgctgcggcgcatttcgatcagtttattttgctgccagaaggcattaaacattggcatagtgacgcgttgcgcacgggcacctttctgagcggcatcatagaaaaatttcagccacgccatttcatctttaccttcggtatagatctcttttccgcctggtttcagtaattccgcaagttcggcaaacacgtcaaaatcgtttcgcgcttcaaattgcggagcgacagcctgcttcatcggtacaatatgctggttgctgtaatcaccggtcatcgtcaagtcattgcgctcaaacgatgtggtgatcggtaatacgatatctgcatgtttagcagctgcggtccagtagcattcagaaacgacgatcatctccggtttctgccatgctttgatcagacgattagtatcctggtgatgggtaaagttaccgccacccgcccaccagatcattttgatattcggatacgtttgttctttaccgttatgctgatatttgccgccaggattttccagcgcatcgacgatacgggcaacaggaatcgccgtcattccgccatcatcagcggcctcgctggcctgtccggcaatcgccgcagacatttccggcagcacgccgccaacacgcgtcgggttgccaccgttggagtaatgataagagaaaccaaaaccgccgcccggtgtaccaatctgccctaacatcgccgccagcgtcaccagcatccagtgtttctgttcaccatattgctggcgctgaattccccagcctgccatcagcattgtgcgattcgccgccatcagttcagcgagtttgactatctgcgcttccggtacgccagtaatttccgccncccaggccgcgctcttcggagtattatcgctcttacctgtcagatactcttcaaactgcggatacccggtggtgtatttttcaaggaacactttatcgtgtttgccttgtgtcatcagggtatgcgcaatccctaacatcagtgccacgtcggtgcccatattcggcgcgatccaggtggcattatcgccaaagaactcgatggtttcagagcggataggatcaatggcaatcactggtttgccagattttttcagctgatggaagtattccagcccttgctcatcggtactgctccaggcaatttttaaggtattcagcgggttcattccccacagcaccacaacctggctgttttccagaatcagcggccaggaggtctgctgttcatacacctctacagaaccgaccacatgcggcatgatcacctgtgctgccccggttgaataatcgccgctatgcccggaataaccgcccgccaggttcatataacgttgcagtaaggtttgcgctttatgcaacacgccagaagagcgccagccgtaagatccggcaaaaatggccgatggtccgttagctttacgaatacgctcatgttgctcatgaatcagttttaatgcctgttcccagctcacctgtacataggtatcttcgccacgacctttcgccggttgcagtggattgtcgagatagctttttctcaccatcggatgctgaatacgcgccgtggtgtgtacctgatccgccgccgtagactgtaaggagttcggtatggttttcgccagcgcgcctgtcgaagaaacaatcttgccgtccttcacttctacgttcatcgctccccaacgtcccgcggtgaggattttaccgcccttctcttctgcccatgcgggtagcggtgctgccgatgtcaccaccagcgctccagcggcaataccgctgtgtttaataaattcacgtcttgttaatgtcataacttcctccctgatcaacgaggatcactgtttctcggtaatatctttggcgttgtactggaaataccgcgttaaaatgtccagttcgttttcgctcatgctggttcgtgcccccattcctttggcaatggacggccacgcattgacggtgtaatggtcggcggcaataggggcatgacaaccagcgcaataggtatcgtcaagtttttcagcgtattgccatagcagtttacggtccgctaatgcgggatcggtaagcgcaccctgtaaagacgcctgacgccattgattgccgtattcgtcagcctgccattccccgtttaccgtgagcgccttgataccttcttcacttaatgtggctagcgccagccgttgacctgccgccaggtagagcgtgttttcactgccctgcatttgataaccctgcaacagaacgatcggctgtttgccactggcatcaacgacggtgagatcggtaccaggattcacggtagccagctcgcctatgcgagaagttttgaaaggataaatatgtgcgccattagtcactgaagtagcggcctgactttccagctcatgcgccgcgttgtcatccatttttatttctggcggaaaatgggcaatgcctttatgacaatcgatacaggtttcgccgcccttttgtgctttgttatgcattttctgcgcagattcactttgcgaggcaatatccatggcatcaaaagaatggcaactacggcacgttgcagagtcagttgcttttaattctttccatactgtttcggccatttcctggcgatgagcttcgaacttatcgtcactgtctattttgccgctaacaaattcatgataaatatctttagatgcttttaatttagcgaataaataatccatccctgactttggaatatggcaatcggcacattccgcacgtatccctttctggttcgaaaagtggacagttccctgatattcctcaaaaggtttactcatcgagtggcaggaaaggcaaaatgctgtatccgacgttttatgtaaggctttttgcgccagcaagaacccgccaccaccaaccacaaccgctatcagcaaaaacaataacccaatgcgttttttccctcgcatagattcctctaattaaattccagaacaccgaaatcattgtataaataaatatacaacgaattgactacttgcttaattcggcacaacactgcctgaaataatcgctaaagaatatgatttattacaatgtaatcattaattgctaaggaataatccagttgttatttagaatatatatttgtcagttttagcaatttaaatcacataattaatgnnnnnnnnnnnnnnnnnnnnnnnnnnnnnnnnnnnnnnncntgtcacccgctcaacagatcnnnnntaatcgttcattttttatactattcagggataaaaaaaggcccctgttgaaattgcaggggcctggtacgagcaagcatcatattgggcgacatgatgcaacggtaaaaatcatttggcctgatggcgttcaatgattcctttcatttcagcaaccgccgccccgtctacgacataacgcgaatactcgtccgcgtgtgcatctgatgacatggacaatccttgattacgataacgcatcggtgaggcttgccacgctcccgcggagctatggacttccagcactccggcatcgaggaagtggtgcaggttttctgcacggactcctgctccggccataatgattggagcatcacgatgggcaataagttccataatttttgataaaccttgcagtgcgtctgatttttgccctgatgtcagtacccgggcaatgcccaattccgcaagattattgagtgtatttagagggttagcgcacatatcaaaggcgcgatgaaaagtcactgccagcggaccggcagcagccattattttttccattcgtgacatatcgacattaccgtcaacatcgagcacgcccgtcaccagtccaggaaaacctaattcgcggaccgtgcgcacatcctcaagaatggcggcaaactcaccgtcgctgtagcaaaaatcaccaccgcgtgggcgaattatcggatgcacagggatcgtcacccgctggcgcacggatttcagtacacccaacgacggcgttaagcccccctcttttggggctgcgcataattcaactctgtctgcgccgttttgctgcgccgttagcgcgcattccatgctgtaacagcaaatttccagtaatgccatttttgctccttaattacgccgactgctcgctggcaacaatctcttcaatggaccacggatgaaatttaatggtcgttttgccatcggtgaccgccagcgtcggattcggtaatcgttcatgctcaccttttggcgaactggttttaactgagatccccggtaggctgagtccttcatcagaaagcaatgccagcgcacgggcattcagcgtttctggatcacccggcaaaacgatttcaatatgttcccaaccttcgtgcgggtaacgtttttccccaggccacggtagctccacaatagaaaactgccagtgtgcaacctgtaccggttcatgcaatttaaacagacaaatcggtctgccattgatcatattttctgacaaaagctcgccacactgttcaaacccgcgacgccagcgctcagcagtggcgttttgatggcaacgcaaagaaatgtgatcggcagtcagcggagtgatattcaaccccagacggcgggaaagttcatctaatgcgtgggtaaatcgcggtaaatccgatgcaatatcctgcagctcgtcgatagattgccagttcgccataatcactcttcgtctttcagtaaaagcgttaatttaccctgttgccctgcgccaaccaaccgctgatttcacgccgcttctgatgcaatagtgaaaacggcaatacgccacgcgcacgttgctgacgaaaacagccatttgcagtatactcccgccctaatttctttaactggtgcgggcaatttttgctcgcttcatcaatgtaaggtattccggtgaatattcaggctcttctctcagaaaaagtccgtcaggccatgattgcggcaggcgcgnnnnnnnnntgcgaaccgcaggttcgtcagtcagcaaaagttcagttcggcgactatcaggctaacggcatgatggcagttgctaaaaaactgggtatggcaccgcgacaattagcagagcaggtgctgactcatctggatcttaacggtatcgccagcaaagttgagatcgccggtccaggctttatcaacattttccttgatccggcattcctggctgaacatgttcagcaggcgctggcgtccgatcgtctcggtgttgctacgccagaaaaacagaccattgtggttgactactctgcgccaaacgtggcgaaagagatgcacgtcggtcacctgcgctctaccattattggtgacgcagcagtgcgtactctggagttcctcggtcacaaagtgattcgcgcaaaccacgtcggcgactggggcactcagttcggtatgctgattgcatggctggaaaagcagcagcaggaaaacgccggtgaaatggagctggctgaccttgaaggtttctaccgcgatgcgaaaaagcattacgacgaagatgaagagtttgccgagcgtgcacgtaactacgtggtaaaactgcaaagcggtgacgaatatttccgcgagatgtggcgcaaactggtcgacatcaccatgacgcagaaccagatcacttacgatcgtctcaacgtgacgctgacccgtgatgacgtgatgggcgaaagcctctacaacccaatgctgccaggaattgtggcggatctcaaagccaaaggtctggcagtagaaagcgaaggggcgaccgtcgtattccttgatgagtttaaaaacaaggaaggcgaaccgatgggcgtgatcattcanaagaaagatggcggctatctctacaccaccactgatatcgcctgtgcgaaatatcgttatgaaacactgcatgccgatcgcgtgctgtattacatcgactcccgtcagcatcaacacctgatgcaggcatgggctatcgtccgtaaagcaggctatgtaccggaatccgtaccgctggaacaccacatgttcggcatgatgctgggtaaagacggcaaaccgttcaaaaccnnnncgggtggtacagtgaaactggccgatctgctggatgaagccctggaacgtgcacgccgtctggtggcagaaaagaacccggatatgccagccgacgagctggaaaaactggctaacgcggttggtattggtgcggtgaaatatgcggatctctccaaaaaccgcaccacggactacatcttcgactgggacaacatgctggcgtttgagggtaataccgcgccatacatgcagtatgcatacacgcgtgtattgtccgtgttccgtaaagcagaaattgacgaagagcaactggctgcagctccggttatcatccgtgaagatcgtgaagcgcaactggcagctcgcctgctgcagtttgaanaaaccctcaccgtggttgcccgtgaaggcacgccgcatgtaatgtgtgcttacctgtacgatctggccggtctgttctctggcttctacgagcactgcccgatcctcagcgcagaaaacgaagaagtgcgtaacagccgtctgaaactggcacaactgacagcgaagacgctgaagctgggtctggatacgctgggtattgagactgtagagcgtatgtaatcgatttttcgtgagagtgaagcctgatcaggtttagccgatcaggcttttttattaccatctaaatgtattctgaaaataggcatgccattgttttctcgctgttgagtaagaggccagaagcgtaatatccagctccagggaaacggtaacggttcaatttaaggaataccgcagtgtttaaatttcttgtattaacattaggcattatctcttgccaggtttacgcagaagatacgcttatagtaaatgatcatgacatttcagccatcaaagattgttggcaaaaaaattcaggtgatgatactgacattaacgtgatcaaatcatgtctgcgacaagaatacaatctcgtcgatgcgcaattaaataaagcttatggtgaagcttatcgttatatagaacaagtgccacgcacaggtgcaaaaaaacctgatactgaacaacttaacttgcttaaaaaatcacaacgagcctgactggattttagggacaaagaatgtgaattaatcctttcaaatgaggacgttcaggatttaagtaacccttattctgaatcagaatggctatcatgtatgatcatacagaccaatacgcgaactcgccagttgcagctataccgtaactctgaagatttttatccaagccctttgacaagaggataattcacatatttttggcatgttttgttgcaagctattcctgataaatgattgcaacaaaacatccagcctttttcactgagttattaaacatactcgcgagcgcgtaatttttttgtccttcagcgataattcacaatcacttcattacgttgtactttcagcgacggaattaaccgcccaccgccaggcacttcccagataaagcgcaacggttctgctgccgctataccggaaaaggccacggtggttccgctctgcccatctaattcgacacaacgagattgcgaacacaagcgaacccgcagtcctgcaggtgtcgggccgataagctgataccgccacgccaccagcgtcatcaatcctgaagcaggttgtcgcgtagaaagaggtgcagacgacatcgactcaccgcgatgatttagcgtaattccgacactacttgcctgccacatcccctccccggcggcttgcaccagcagcggaaacaataatattgctaataaggttctcatcatttaccgccaattgtcgccgtcatgcggatatgtcggttatcagacagttccagattcgacagcaccactaactgcggcaagctgcggcgcagaaagcgagacaataatggtcgcagcgcgtggttcaccaataaaactggcggcgcacccaacatctcctgacgggatagcgcttcctgagtttgcgccagtaaacgatccgccagccctggctccagtccgcccccgccctgcaacgcctgtagcaacaaacgttccagcggtgtatcgaggccaataacatggacttcatctttgccaggaaaccactgctgggtaatcgcccgtcccaacgccacgcgcacgacggcggttaattcatgtggatcgctttggatgggcgcatgttccgccagcgtttcgagaatagtgcgcatatcgcgaatcggtactttttcatcgaggagattttgcagcactttatgcagtgtggtgagcgtgacgacgccagggacgagatcttccgtcagctttggcatctcctgggcgacgcgatccagcagctgttgcgcctcctgacgaccaaacagctctgcggcatgctggctaatgaggtggttaagatgcgttgctaccaccgtgctggcctcaaccactgtgtacccctgaatctgcgcctgttcttttagcgcactttcaatccagatagcattcaggccaaatgccggatcgacggtcgcctcaccaggtaacgtcccggcagcggttccagggttaatagccagccagcgccccggataagcatcaccactgcctatctccacgcctttcatcaaaatgcgatagcgggcaggttgcagatccatattgtcgcgaatgtgcaccactggcggcagaaatcccatctcctgggcaaatttcttgcggatactgcgtatacggcccaacaactcaccatcctgctggaaatcgaccatcgggatcagtcgataacccacttccattcccagagaatcttccagttgtacatcgttccacgtcgcttcgacaacggcattattctctgccatttttaccggttttggttcggcaggcgctttttgttcgcgtccacggatccaccaggccagccccagcaatccggcagtgaacagcaaaaataccaggttcggcattccaggcaccaggccgagtaaaccgagcacggcagcgcttaacaacataacgcttgggttactgaaaagctgattcaccatctgctcgccaacatcctgatcggtgctgacacgcgtaacaatgacccccgcggcggnagnnnnnnccagnnccgggatttgtgccaccagaccgtcaccaatggtcaagagcgtataactttccgccgcgtgtcccatgctcatgccatgttgcagcacgccgaccagcaacccgccgacaacgttaatgaccatgatgaggatcccggcgatggcatcgccgcgaacaaacttacttgccccgtccattgagccgtaaaaatcggcttcctgagtgacttcggagcggcgttttttcgcctcatcttcaccaatcaatccggcgttaaggtcggcgtcaatcgccatctgcttacccggcataccatcgagaacaaagcgcgcacccacttctgcgatacgcccggcacctttggtaatgaccataaagttgatgatcacgagaatgacaaacaccacgataccgatagcgaaattgccaccaacgaggaagtgaccgaacgcttcaaccaccttccctgccgccgctgcgccggtatgcccttccattaaaatgatacgggttgaagccacgttaagtgccagacgcaacagcgtggtaaacaacaaaatggtcggaaacgcagcaaactcaagcgtgcgctgggtaaacatcgccaccagcaacaccatgatcgacaaggcaatattgaaggtaaacaacaggtcgagtatgaatgcgggcagtggcagcaccatcatcgacaagatcaacaggatcaaaatcggtccggcaaggatctgccattgtgtcgatttcaggtttgtgggcaggcgcagcatcgcggccagattactcatgggtcggtttctcgttaataaaatccagggcttccggcaccggaagatgagtaggttgtacagggcgctgtccaccagccagacgccagcgtttcagttgccagacccaggccagcacttccgccaccgcggcgtacagttgacccgggatttgttgaccaatctccgcatgtcgatacagcgctcgcgccagcggcggcgcttcaagcgtcgggacgttattttcancgccaatttcacgaatgcgcagcgcgaccagccctgcacctttagcgaccactttcggtgcgctcattttgttttcgtcatactgcaacgctaccgaatagtgggtcgggttattgacaatgacatccgctttcggcacatcggccatcatccgacgccgtgcggcagctcgctgcatctgacggatccgccctttaacatgggggtcgccttcgctttgtttgaactcatcacgaatatcctgccgcgacattcgcagctttttcaggtggctgaagatttggaaaaagacgtcaaatcccaccattggaatgacaccaagcaccaccagcagtgcgcatagccctaccaaatccatcgcattacccatggcggtaatcggagactcggccattaagcgcatcatatgcggccagtgatgccagagaaaaaaccccgtcacgctgccaaccaggatggttttcaaaattgctttaagcaactccgcgccagtctgtgccgagaacatccgttttatgcccggtagcgggttgagtttggaaaacttcggctgcaaggattttccgctaaataccagcncccccagcataaccggagaaatgagcgccaccagcaccacgccgctaatcancggtagcagcgccagcatggcttctctgatcagcagaataatttgcccgaggatcagattagggtctttgataatactgtgatcaaaatgcagcccagcggagagcatgcccgacaatcgacgggccagcgacacaccgccaaaccagataacactaacgcccaccagcaaaatcagcagtgaggtcagttcacgggaacgcgggatttgcccctcttcccgcgctttttctagtcggtgaggtgtgggggcttctgttttgtcgtcgctctcgtcagacacgtcgccaatcctggaaagagtattaagcgtaaatgatgccagagcgcaaagcgttcaatggtttgagtaaggggcaaaacaggcgggatttanggcttttgctgccacacatcaagcatagtgtgcgtttgtcggatgcggcgtcatcgccttatcagaccgcctgatatgacgtggtcacgccacatcaggcaatacaaatcaaaatccaagactatccaacaaatcgtccacctgatcctgactggctaccacaccggctttgctggtatcgacctgaggtccattaagcaaactctggttttcacgttttggacgcgactcctgttccgggatgttttccaacagcaccatcagcaactggcgttcgatctcctgaatgacatccatcatccgcttaatgacctgcccggtgagatcctgaaaatcctgcgccatcatgatttccagcagttgcgcgttagtaaagctggtatgcgcgggtacatctgccagaaatttccgcgtatctgttaccagttcacgggcgtcggcaaggtcaatcggatcggcaaaccagtcatcccaacgttgggttaacgcttttgctgatttctccatttgatcctgatgcggttgtgacgcctcaacactgttcagcgcccgctccgcagcctgggcggtcatctgcacaacatagtacaaacgatcgcgcgcatcggggatggcttccgccgcttcggcaatggcctgatccagtcccagttcccgcaaactgtcgcgcagcatacgcgtcaggctgccgatgcgcgcaatgatatcgccagctgaatgctcgtcagcaggtttgattgatggttgcatcatagtcgcatcctcacatgcccagtttctcaaagattttgttgagtttttcctccagcgtcgcggcggtaaatggcttcaccacatagccactggcccccgcttgcgccgcagcaatgatgttctctttcttcgcttctgcagtcaccattaacactggcaatgccgacatcgcgccatccgcacgaatcgttttcagcaattccaggccatccatgttgggcatgttccagtcggagataacaaatccataaccgcctgcctgcaacttattgagagcgtcgacgccatcttccgcttcctcaacattattgaatcccagntctttcagcaggttacgcactatgcgtcgcatggtggaaaagtcatccacaaccaaaaatttaagttctttatccgccatttcacactcctgatttaaatacgtatcgcctgtccggcactaatttttgccaacatttgctggcttacctggttaagatcgaccacttcgcagacaccacccatattgatggcctcgcgcggcatgccgaacaccacgcaacttgcttcgttttgcgcaagggtccatgccccagcctgacgcatcgccaacattcccgccgcgccgtcgttgcccataccggtcaggatcaccccaaccgcattacgccccgcctgtttggcgacagaatggaacaacacatctaccgaaggccgatgacggttaaccgccgggccatcgtgaattttgatttggtaatttgcgccactacgcgccagctccatatgccgatcgcccggcgcaatataggcatgccccggcaaaacacgttccccgtcttcggcttctttaaccccgatctggcaaagcttattaagtctgtcggcaaaagagcgggtgaaaccgggcggcatatgctgggtaattaacagtgccgggctggaaagcggcaacggttgcagtacgtgacgaattgcctcagttccacccgttgaagcaccaatcgcaatcagtttttcagaactcaacaacggccctgccttcagcgttgtcggtgccgacaatggcttatgtgctgcaaggctcgcctttgctgctgtacgcaccttttcagcaatcatttcgctgtacgccagcattccttcgcgaatacccagttgcggtttggtgacaaaatctattgcccccagctccagcgcgcgcagcgtgacttctgatcctttgccggtcagggaagaaaccatcacaacgggcattggacgcaaacgcattaatttttcgaggaaatccagtccgtccatccgcggcatttcaacatccagcgtcagcacatcgggattgaatttcttaatcaagtcacgcgcgaccagcggatcaggcgcggtcgccaccatttccatgtcgctatggctgttgatgatttctgtcatgatctggngcatcagtgccgaatcatcgacagataacaccctgattttgctcatcgttaatccttacttagcgcatacaccgtttgaccacgcagcgtgaagcggcgctcgaggtggctaaagttttcagagtgacccgcaaacagcaatccgtcgggtttaaggagcggaacaaagcggcgcaaaatctcctgctgggtagtttgatcgaagtagatcatgacgttacgacagaagatcgcatcaaacggccccggcacggtgtactgtttcgccaatagattcagcgaggcaaaatcaacatagttcgccagctcctgacgcacgcgtaccagcccttcatgcggtcccgtccctcgcatgaaataccgttgcagttgctgcggcgtcaggtttttcaactcttcatggcgatagataccgcttctggctttttccagcacttcggtgtcgatatcactggcaaacactttccagcgtccgggcgcggtgcccaatgtgtcagccagcgtcatcgcaatgctgtacggctcttcgccggtcgaagccgccgcgctccatacgcgatactcgccagaacggcgacgtgcgtgatccgcgagcagagggaaatgatgtgcctcacggaaaaatgccgtcagattcgtggtcagcgaattgataaacgcctgccactcaccgctgtgctgattagattccagcaagttcagataatgaccgaaatccgtcagtcccagcgaacgcaaacgacgaaccagtcggttgtaaaccatgtcgcgtttatggtcagccagaacgatcccggctcgttgatagatcaattgacttatccgccgaaaatgcgcgtcggaaagcgccaggcgctcggtcatctgtaacaataaagacgtttgcccacagggcagagatgaagtcatagcgccttctcaatcacttcaggataccactggcgcaatttgtaactgcgccgactcatgtcgtgctacttcatgttcttcaagggtaaataccgccacacgcgacgaaagatggtcggcctgattcgccagttgttccgttgccaccgccgcttcttctaccagcgaggcgttctgctgtgtcacctgatccatctggctgacagcctgcgcaacctgctcaatcccccgccgttgttcttccgaggccgaagcaatttctcccataatgtcgttcacgcgggtcaccgaactgacaatatcggtcatggtcgcggcggcgttattcaccagtttcgaaccctgctggacacgattgactgactcttcgatcagccctttgatctcttttgccgcctgggcgcttcggctggcaagattgcgcacttctcctgccactaccgcaaaaccacgcccctgctctccggcgcgagccgcttctactgccgcattcagggccagaatattggtctggaaagcaattccgtcgataacgctgataatgtcgccaattttttgcgagctggtggcgatctcctgcatggtgtgagtcatggtactgacctgaacaccgcccgcctgcgccgttgtcgcggcattttttgccagttccgacgcctgtcgtgcgttatcggcgttttgccctaccgtggcggttaattgctccatactggcggccgtttgtgccagcgatgccgcctgctgttcggtacgacttgagagatcgttattgcctgcgacaatctccgcgataccaatgtgcatctccnnnntncccttacgcacatcacttaccgtcccacgcaaagcctgctgcatggtcttcaggctggcaaaaatggcggtgatctcattacgaccatataccgcaatcggacgcgccagattacccgcagcaatgctgtcaaaatggctaccgataatggccagtggttgaacaatcatcttgcgcgtccaccacagcgcactgctgatgtagatcgccgcaacaataatcatgctgataaacaccagcgccgaaatctgatagttacgctggctttgcgcactggcggcttccagcacatggatgatctccagctgccaggcctcaaagttaacgtcaaacgcattctgtgatccctgcaccggcgcagtgaggaaatccgaaagttgattactttcaagccaggtcgcctgatgttcgagatcgttgtgccagcgggcaaaacttttctccgtctctttttgcaatgccctgacgtgctcgttgcccgcagtcatcgccataaaacttttaaacagcgtggtggattgcgtcagactggcacgcgccgtcgtcatcaacgttttaatgtcatccgccggatagctaagcgctgtcagagtgcctgctttgttcagcgtggtactggcctgtaacattaccgcccgagtttgcgctaatgccgcacgttgctgattgctctgctcgacctgattcagtcgttgcaaatcgtcgcgaaatgcccaaaaagacatgccgttactgccaatctgcaagatcccgcagagaatcaaaattaaaaacagcgtggtcgaaattcgaatacgattaaacatcaacgctccccatcaggcggcaatgaccgcgttagtaaatactcgtcaaaatgtttcccagtttggatcttgttcagcaattcgcagtcgtggctgtgccggtggttgctcactggcaggacgggatggtgtttgcggtttattggtgagtgggctggctgccagacgaaacgcggaaaccgcttgcgttaaacgactagcctgttcttccagcgcagctgcagcggcagctgattcctgcaccagcgatgcgttctgttgcgtgacgtgatccatttccgaaaccgccaatgcgacttgatcaatgccacggctctgttcatccgatgccgatgcaatctcgcccataatgtcagtcacgcgagtgacagcattgacgatattgttcattgtttccccggcgctttcgaccagcaccgaaccggtatcaacgcgcgagacggagtcttcaatgagagctttgatctcttttgccgcctgggcgctacgactggcaagattacgcacttcgcccgccaccacggcaaaaccacggccctgttcacccgctcgcgcggcttcaacagcggcattcagcgcgaggatattagtctggaaggcaataccgtcgattacgctgataatgtcggcgattttcttcgaactatcggcgatctcatgcatcgttttcantacgccatccaccactttgccgccgtgctgggcggtgtcggaggcactttgcgccagttgcgaggcctggcgggcgttatcggcgttttgcttcactgtcgcggtgagctgctccatgctggcggcagtttcttccagcgcggatgcctgctgttccgtacgggaggaaagatcggtgttgcccgccgcaatttcacgggtaccggcatagatggcatctgaaccttcgcggacatgagtgacggtgtcagtcaaagagcgttgcatatgtgaaacgctctgcgccaggtcgcccatttcactgcgcccgtcaatggtcagggtattcgccaggttaccaccggcgatttcgcgaatgtgagcaataatttttgccagcggtgtaagcaacatacggcgaatgccataccacgccaccagcagaatcaataccaccaccagcgcgataaccgccagttgccactgggcaaatcggtaatcatctgcgttgtcagtgacgatatcgcgatacagtttttcactgctgagggcgtactgagcaaacgcttcgcccattgcattttgcattccctgggttggctgagcgaaataagctccagtattgccataatcaagataatcaatcagttcagttaacgctgtgtaatagtttttatatttttcatcaatattacgactggtagcgaccatttcaggtaacggtgccatgcttttgaattttttataatgagtcgcggcctgggccaatgttttcctggcgctatcgagcaattcaactttggcattactttgttgattggaggaatccatcatcattcgcaccgctgaacgactcaggttaatgcgcgtttgcagcattaaattccaggttgacgtcagctcgccctgctgttctcgtaattgattggaaaccacaaagctcttctggctatggtgaagggaagaaaaaaacagactgccggaaataagctgtaacagtgcgaatacccccagcaccattaccaacagcgtgactacgcggatacggttaatcataaggcaccttcctgaaaacaagttgatctcgttatcggcaaggaagggggaaactttattgctgatgccacccgccgcgaaattgaaataaaacccgatgcgcagatcatcgggttcatttcaattgaggaaatcaggagaattacgccacttctgacgccgcgctatctaacagcgccatntnttcgctgttcagcagtttttcgatgttcaccagaatcaacatacggtcgcccagtgcgcccagtccagtgagatattctgttgaaagcgtcacggcaaactctggtgccggacgaatttgctccgccgtcaatgaaagcacgtctgaaacgccgtcaaccacgatgccgaccacccgctgtccgagattcaggacgataactaccgtgttgtcgttatagtccacatccacctggctgaacttaattcgtaagtcaacaatcggcacaataacgccgcgcagattcgtgacgcctttgataaacgctggcgtgttcgcaatccgtgttacctgatcgtagccacggatctcctgcactttcaggatatcaataccgtactcttcatcaccaagggtaaataccagaaattcctggcctgacggctcgctggccagctttgttacattcgtcataccggtcatattgttacctttttactcattcaggcggcggtgttcgccatacgttgttcgcggtttatcgcctgcaaggcggagacatcaacaatcagtgccacgctgccgtcgccaagaatggtcgcagcagaaatgccggggactttgcgatagttactttcaaggtttttaactacaacctgatgttgaccaattaattgatccaccagcaaggcgtagcggcgaccgccactttgtaagatcaccacaattccctgggtagcttcggttttcgcgcccgcgacgttgaacactttccacagttcgacgatgggcagatattcaccccgcacttccagcacccgntcgccgccggccagtggatgcagatcggcttcacggggttgcagtgattccataacagcattcagcggcagaatgaatacttcatccgcaacgcgtacggacatgccgtcgaggatggccagcgtcagcggcagtaaaatgcggatcgtagtgccagtaccctgcttcgactggatttcaacatgaccgcccatctcctggatattacgtttaacgacgtccatgccgacgccgcgcccggagacgtcggtgacctgctctgccgtggagaagcctggtgcaaatatcagcatcgcgacttcgtcgtcgctcatgttttcgctgacagtcaaaccttgcgaggccgcttttgccagaattcgctcacggtttagccccgccccatcgtcggtcacttcaatgcaaatgttgccgccctgatgttcggcagacagaattaaatttccgacgctgtttttacctgcggcgagccgtttttctggcagttcaataccgtgatcgaggctattgcgtaccaggtgggtcagcgggtcgataatgcgttctatcaggctcttgtcgagctcggtggaactgcccaccagcgtcagttctacctgcttgccgagttttcccgccagatcacgcaccagccggggatagcgactaaagacatattccatcggcatcatgcgaatcgacatcactgattcctgcaaatcacgggcgttacgttgtaactgccccatgctggtaatcaaatcaccatgattaaccgggtccagttcgctggaacgctgggcaagcatggactgggtgataaccagctcgccgacgaggttaattaattgatcaaccttttctaccgctacacggatgctggtggattcactgctacgcgtcgttttttcccgctccacgcgaccggttggcgcttgttcggctgccagtttaagcactggtggggtggatatttttggcgagacttctactgtttcaaaggtaatctgatcggcttcaatcacaaaacagagtaccgctgtgatgtcatcttcggcgatatcgcccggtaatattgccgagagagaatccgcccctttcaccacgtcagttaacgttgtcagatgccccagctcttcttccagcaggtcgacttcgctggccttcaggcgcgaaaggataattcgtcgcggcaactgactgcgactctgctcatcttgcggttcacttttggcaaccacacttaatcgggtcactgcggatggcgtttcgcctttcgcttctaatgccagttgacgcaaggcctggcagatataatcgaagctggcggcatccggctcttgcgactgtttataagcgtcgagctgttcttgcatgatgtccttcgtttccaaaaacagattgataatgtcggtgttgagttgcatctcacctcgtctggcttcatcgagcaggttttccatcagatgcgtggtttcctgcaaaacgctgaagccaaaagttcctgcccctcctttgatcgagtgggcagcccgaaagatggcattcaattgttcggcatctggcgcttccggctgcaaaaccagcagatgctgctccatatcagccaacagttcgtccgcttcatcaaaaaatgtctgataaaaatcgcttatatccatgctcacgctgtcacctcggttcggctgatggcattgtgggaacactgacctgtggtgcaacctcaggtttttccagggcgcttactggctcattctggctttcggcgttttcatgcaaaatggcctgttcggcttgtttgttcagtaccagcaggctgatgcgacggttgacggcatcatcaggtccgcgatcgcttaagcgcatcgttgccgccatgccgaccacacgtaacactttgccgctatccaaccctccgaccatcagttcgcggcgggatgcattggcccgatcggcagaaagctcccagttgctgtaacctttctcaccactggcgtaggggaaatcatcggtatgacccgaaaggctaatacggttgggaataccattcagaacgggcgcgatggcacgcagaatgtcgcgcatatagggttcgacgtcggcactgccagttctaaacatcgggcgattctggctatcgatgatctgaatacgtagaccttcctggaccagatcgattttgagatgtggacgtaacgcccgcagtttcggatcggactctatcaattggtcgagatcgccacgcaatttccgcaatcgactttgctccatgcgttttttcaactcttcgatgttcggctgcttattcacttccccctggctttgggtgtaatcatcgccaccgccgggaattgggctttcactattagaaatgcgatcgccgcccgtaaccgcagtcgccagtggagtccggaagtactccgcaatctgaatcaactcttttgggctggagatggagatcagccacatcaccagaaaaaaggccatcatcgcggtcataaagtcggcataagcaatcttccacgatccatgtgctgccccgtggcttttggctttgcgtcgtttgacgacaatnatcggatgcgcttgattcttcatgcttcctcggttgtcgtctgttgttgcggatttttcaccgcacgcacatgctcttccagttcaataaacgacggacgttcgctggaatagagcgttttgcgaccaaactcaacggcgataggcggtgcgtaaccgttcagattagaaagcagtgtgactttgacgcactgcatcattttgctggtttcggcgcttttctgacgtaaaacactcgctaatggggaaataaatccgtaagccaataaaatgccgaggaaagtccccaccatcgcatgtgcgataagcgcccccagctcggcggcaggacgatcggctgaacctaacgcgtgaacgacccccattacagccgcgacaataccaaacgccggaagtgagtccccgaccagcgccagactgttcgccgggacttctgcctcgctttcgtgcgtctcaatctcttcatccatcagggcttcgatttcgaaggtgttcatgtgaccgctgataatcaggcgcagataatcgacgataaaatcaagcatgacgctatccgcgatgatgcgtgggtagctggcgaagatctcgctctcacggggattttcaatatcacgttccagcgaaaacatccccatctgccgcgatttcgccatcaaccgataaagcagagccagcagatccatatacattgctttggtgtatttggagcgacgaaacagcaacggcagcgctttcagcgtgcctttaatcgcttttccattattgccgacaataaacgacccaattcctgcaccggcaataatcaccagttcagcgggttgatagagtgctccaaggcttccaccggtcatcaaataaccgccgaaaactgtaccgagaacaaccaggtaacctaataagataagcacgacatcatccttccactgttgaccatgacaggatgttcagtcgtcaggcgttaacgcgcgattggggcanaaaaaagcagcggtacgtcgttaccgctgctggaatgttgcgccacaccgtatcagttaaacagcctgtactctctgttcatccagcagttgtgggataatatcggcaggattctgggaaagtttacgtctttttactgcccgggatggcggttgacataagctgcaggcaaagctgccaacaggctggtgagcgtgggtaataaaattgccgccgcagcagttgcagctggaaagttgcagtaatccactttcaacaaaccgcaccaatgtccaggcacgggttaatgccagcagcggtccttcttctgcttgcgggcactgttcaaggtataaacggtaggctttgatcaccgcatcgacgccattacacaaaccggttttcagtaaaaactgccatgcattacagaacatcgaagcatgaacgttttgttcccaagtcataaaccagtcggttgagaatggcagcatgcctttcggcggtgggcttccgcgcagttctttataaagttttatcaggcgtccgcgacttaactgtgtttcgctttccagcatctgcaaacgagcgcccagggtgatcaattccattgccagctgaatatcccgcgcttcctgaacaatgcttttttcactcatgatcaggcccttttcttgcgcagcgcttcttcaggctgattaacatcattcagcaagcgtgttgagagcatgatgccggtatgaatttgctggagatcgtcaacgcgggaatcttgcgtcaactgagtaatcgtctggtggctgtcaaaacggaagtgacaaaccagctgattggtttctgccagcttaaccatttgcggaagagtcagtgccgctaatgttgtcgccatttcttcatttatgccgagacgaaacatagcggacgctttgtcctgaacaatcagacgctgtgcaagtagtaaatatgacaagttgatgtcataaatgtgtttcagcaactcggaggtatgcattattcccacccagaataaccaactttatttttatgcggtttcaccgcaccccgtgatgtcgccgggaagccccggtaaaaaataattagcattagaatagttgcgataagctgcaataagcagagccacctttttggtttaataagtccttacaaatagaagggggtctttacacttatctaagatttttcctaaatcgacgcaactgtactcgtcactacacgcacatacaacggaggggggctgcgattttcaataatgtgtgatgcagatcacacaaaacactcaattacttaacataaatgtataagtcatacttttgttttgggtgtatttcaatctgttaaaaagtttttcgctacgctagcaagcaaaaatgaaacaggaataatcgaaatgggatgttgcgcacagttaaaataactcaccgtaaagaatcatctgctataaataatcactttcatgcaataccagataagctatttttaaacagacacttaccgcacaacaaactaattaaatacaaagaaaggccacaatcaacttaatgttaataaaatgttttgcatacattaaccacttgtttaatgcggggaatcagtacattattttcttataattacagttgaaatcatatgatcaccgagagtgattgattaattgtctttactaataatcagactaatatttacctgtttgactgagttgggattgcgtcgtttctccattaggagtaaagctttaatgtcacctgaagttcacagaataaggaacaggttatgagctatagcaatattcttgtcgctgttgcggttacaccggaaagtcagcaactgctggcaaaagcggtatctatcgccaggccagtaaagggacacatcagtttaattactctcgcttccgacccggaaatgtacaatcaattagctgcgccgatgcttgaagatttacgcagcgtgatgcaggaagaaacgcaaagctttcttgataagttaattcaggatgcggggtatcccgttgacaagacgtttattgcctacggtgagttaagcgaacatattctggaagtttgtcgcaaatatcatttcgatttggtgatttgcggtaatcacaatcacagtttcttttcgcgagcatcctgctcggcgaaaagagtgattgcctcaagtgaggtcgatgtgctgttagttccacttacgggagattaaccgctcctacgcaagcttaggaaaggtagcaactttatcgcgctgctggctttccgcgcttcgcggaactatctgctttaggtcgctaatgaagcactcctgccagtggttaatatcgtttttcacgataacgtccagcatttctgcatgacgggaaatacgttccgccagcgacatagtcaatgcacgatccagcgcagctgcaacttcgtcacgatcgtagggattaacaattaacgccgacgttaactcgtttgccgctcccgcaaattgcgaaagaanaagaacgcccgggttggctgggtcctgagcggcaacatactcttttgctaccaggttcatcccgtcacgcagtggcgtcactaagcccacgtcagagtagcggaatattttcatcagtaatttacggtcaaaatgctgattcaaataataaagcggcgtccagcctaattgcccgtatttaccattaattcgtccggcttcattttcgagctgatgacgaatatcctgataggcttgcacatcaccacgcgacgttggtgcaatctgggtataacgaattttaccatgatgctgcggatatttttccagcaacgcttcataggcgagaaaacgctctggcaaacctttggaataatccagccgttcgacagaaaagatattttgtacgtttttcagttccgctttaagttgcgccagttttggcggcagtggcccggcagcctgtttggctatttcttttggctcaatgccaatcgggtaaacttctgttcgaaacgctttgccccaggctgtatggctttttgcgctacgtgtcgtgacgcgggtcaggttagaaaggcaatccaggaacgccagacgatcgttttctgtctggaaacccagcaaatcataatcacaaagctgttcaagcaaggtgtcatatgtcggcagcgcgttgaagatttccggtgtcgggaaaggaatatgcagaaagaaaccaatgcgattattcactccccgtttgcgtaattcatgcgcaaatggcaacaggtgataatcgtggatccagataatgtcatcgtcttgcaacagcggcagtaatttatctgccagcaacgcatttacgcgtagatagccgtcccaggcaggacgctgaaattgcaccagatcgaggcgataatgaaaagcaggccagagaacggcattggagaattggttgtagtattcgtcaaggtcctgttcgctgaggttanaaaaggcccacgtaatgttaccctttttcaccttttttagcggctgatcctcattccctgtttcaccactccagccaaaccacagtccgcctgcggctttcagtgcccccagtatgccaacggcaaggccaccggcactggcggcgtgctcatctggtggtgcaatccggttagatactacgactaaacgactcatagtcatcactcctgttattttctcttttttgttgtaatgcggtggttatcatttcaagccagctccagacatccggtacgcccgccagtcgccatgatgcctgagttgcgcctgtgccaatttttactgacattccgcccagtcggttaacgactgcgaagccagattcatcggttaaatcatcgcccagaaatacgggcgttcgcccgataaagggagcttcctgcataaaggcagcaatcgcctcacctttactggtacctctcggtttgatctcgacaacacactttccctgctgtaacgccatttgtggccagatctgagtaatacgttgcgctaatgtcattaatgcgtcttcatgctgcggagcctgacgataatgcagcgcaaaagccatccctttcgtctccagctccgcaccgggatactgggcgatgaccgtatgcagttgcacgttaatatcacgtgcaatcgcatccggcagatgaacgatatgcgttttaccattgatgtcacggcgctccgccccatgcacgcccgctaacgggaagcgataaggttttgccagtgcgtccagctccaccattgagcgccctgatatcaatgccaatgcaccatcacttgcggttgccagtagctgaagtccttgcagaatattgtcaggtacgacgacctgatcgggatgcggtttgatttccgccagcgttccatcgagatcaaaaaaccaggcatatttcgcggatagttcaggggtttcggttaacggttctgtcacccggttctcctccttctcttttcttattgtgttgcgcagaacgcgctttacagacatgtaagtatagacagtgtgacgggggtcgccatttgcaacgaagaacagccaaccgttgtggcggctggctgtggtgggaaaaaacgttaaattgttgtggaaaaaagcatcagacagtgcgtttcgctttttgcttgtaacggtcgaagatcaccgctgccagcaggattaagccgcgaaccacgtactgcgcgaaaggagaaatattaagcaggttcatggcgttttccacggtgcctaaaattaagatacccgccaccacatatgagatttttccgatgccacctttcagagaaacgccacctaaaacgcaggcggagataacaataagctcataaccaatcgacgtcattggctgcccactggtcatacgtgaagccagaataattccggctatcgcagataccaggccagagagaacaaagataataattttggtgcgaacaaccggtacacccgccagacgcgcagcctcttcgttcccgccaatcgccagggtattacgaccaaaggtagttttattcagcagcaaaccaaagataatcagacacgcgacggtgagccagattggcgcaggcagaccgaaccagttggcgtaaccaagggcaaagaagctttcatcttcgataccgaccgctttaccgtcggaaatgatgtacgccagacctcgaacaatctgcatcgttgccagtgtcgtgatcagagcatttattttcagtttggcgataacaaagccattgaccaggccacagagaatgccaagcagcaaccccgctgccacgccaatccacaggctttcagtcaggttgataaccaccgccgtggtgacacccgnacaggcaattacggaggcgacagaaaggtcaaagtcaccggaagcaaggcagaacaacatgccacacgccaccatccccgacatggaaattgccaggcccaaccctttcatattaataaaggtggcaaagttcgggacaaaaatggcacaggcgataaaaagcaccgcaaacaccaccagcatgccgtactgatcccagatacgcccgaagctgaatgacgacttaggtgcgccagaacccgatgtagaaacagaagacatcatactctccttactcaggcaactgcctggctgactttaggcatcgcaaggctcagtgcctgacgctcatctgcctgctcgtgtaacaattcaccggcgatttcaccttcgcgcatcaccacaatccggtcggcaacgccgaggacttcaggtaagtcgctggaggcaaacagcaccgccacaccctgcgccgccagcgcataaatcacgttatatatttcgtgcttagcaccaacatcaatgccgcgcgtaggttcatccagcaaaatgaccttcatctcttccgataaccagcggcccagaatggctttttgctgatttccacctgagagattcataatcagttgctcagcgcccggcgttttgatgttgagcgaacgaatgtggtgatcggcattgttttcttcccaaccgttgttgattacacaaccgccgagcacatgtttacgtctggcactgatgttgatattgtcgcgaacggagtgcacaggaataatgccttccgctttgcgatcttccgggcagagcatcatgcctgcggcaatggcgtggctcggtttacgaatatcgatcggctgttggtcgatataaacctgaccggcggtgatttgcgtcccgccaaacatgcctttcattaattcgctacgccccgcccctaccagaccaaacagcccaacaatttcaccactgcgaaccgccagacttattggcgtacgcacgcctggtgctttcacagcatcaagacgcaggcgctcctcgccataactacgcggttgccagccgtagatatcgccaatgtcgcgcccgaccatcgcctgcaccagcgcgtcgtggtcaacctgctgcatatcggtaaaggttttgacataacgtccatctttaaagacagtgatggcatcgctgagggcaaatatttcttccatacggtgagaaacgtataagatcacccgcccctcttttcgcagttcacgaataacgcggaaaagattgtcgatttcgcgggcagaaagggagctggttggctcatcaaaggcgataattttagcgttacgcgccagcgccttggcgatttcaaccatctgccactgaccaatggagagatatttcagcggcgtgtccgggtcaatatccataccaagatgtttaagttgtaaacccgcctcataattcagcaatgagcgattcacaatgccgcctttatgcggcagctggccgagatagatgttttccgcgacggtcatttccggcacgagatgcagttcctggtaaataatcgccacacccgcgttaagtgctgcggtcgtgtcggaaaaggacatttcctgcccattaatcactacagaacccgtggttggcgcatagttgccgctgaggatttttaagagagttgattttcctgcgccattttcacccatcaacgcatgaacctgaccggcatagcagtcaaaactaatatccgtcagcgccttaacgccgggaaacgttttaccgatgccgcgaaatgagagatacggggtagactgttgcataacgtctccgtgaatcactggtcgttcacaccccctctgcatcatgcagaggggaatttttccggcaaattacttaccgcctaaaccttttttctccagttcttctttaaagttgtcacgcgtgatcagcaccacgtcggtaacttcggtgaatttggtcggttcaacnccttttgctacccagttgtnaagcatttcgctggacttataaccatgtacgtccgggcttggcaacagggaaccgtagaagccggttgcctgtgccttagacagttcgctcaccgcatccacaccgttaataccgataccgatgatatcggccgcttnnannnnnnnnncttccgtcgcgcgtacgccgcccagcacggtgctgtcgttcataccgacgatcagccaatgtttaacttccggatgttgaaccagcattgagttggcagcgtcaaatgccccggggatgtcgttagatttggtaggtacctgataaatttgtttttccgggaatcctgcagctttcagcgcatccatagaacccgtagtacggcgacgagccgtatccagttcgttggaggtaatcgccatcaccgcgctttctttgacatcccagccacgtttctgcatctctttatacagttcctggccctgacgttcgccaattttggtcgccgccatcatcaccagaggaacggtatccattggcttacctttggcgttaacaaactggtcatccacggcaatgactttcatatcgtagccacgcgctttcgccacgatggcagagccgagtttcgggtccggagtacaaataacgaaaccttttgcgccactggcggccaggctatcgatcgcgttcaatgttttttcgccatccggcacggcaatcttaataacctcaaaccctaaatccttcccggctttatcggcaaacttccattcggtctggaaccacggctcttccggttgcttcaccaggaaaccgagcttcaggttctccgccatagcggattgtgacataacggctgccagaccaatggctgccagggctttagtaaatttgtgcatggttctctccagctttagtgtcgttttnnnnagggcaaaaacgaatgacattcgttaaattaatcggaaaacaaagcattaccttttaactaaaagataagtgactgtgttgacatagttttagcgagaaattaattctccataggagagcaatatcacatcgcagaattacagtgagaacgtgcataaatttagcgggaaaagacataaggaaaagccaatttgtcagacaaattgttgaatgcacagcagattaatccataagattagcctggaaatccttgttgtctttggtacccatgcgggatgtcttctttttcaccagtcaataggccgcattacctggcgttgagtttttgaaatggtgtaataaccgcaactcaaagatgtggaaaatgcacgtcattcatttcgtcattaattatcactgtgctcattaattaacagaacacgtataatgagagccatctcgcaaaaatgaaaaaacgttttataaaatcatcacttcatcatgaattcaaattcattgattaatatcaacaagatacaaaaagcactatcattaaaattcattgcagttacattgatttcatcaatgaaatgtaaaaatatataaacttgatgatttaagcattttcttatacccgttcagacgttattcttatttcagatcatcgtcagaattgactccacgatcacatttcggaccggcagaaaggaattattctgcaaacagtaattatggtgttttgatttatcttgcacctctccacttctggatataaggatattaggtatggcaaccgctggaatgcttctcaaactcaactctcaaatgaaccgcgagttttacgcatccaatctctaccttcacctgagtaactggtgttctgaacagagtctgaacggcaccgccactttccttcgcgcccaggcacagagtaatgtgacccaaatgatgcgcatgtttaactttatgaagagtgtcggcgctacccccatcgttaaagccattgatgttcccggtgaaaaactgaactctctggaagaactgttccaaaaaacgatggaagaatacgagcaacgttctagtacgttggcacagttagccgatgaagcgaaagaactgaatgatgattcaaccgtcaatttcctgcgcgatctggaaaaagaacagcagcatgatggcctgttgctgcaaaccattcttgatgaagtgcgcagtgcgaaacttgcgggtatgtgcccagtgcagaccgaccaacatgttctgaatgtcgtgtcgcatcagctgcattgatcatacatcgacgctaatgcattgcaccgatgaagtttttgagaaaccgctgcctcatcttttttgaagcagcggttttttaatgggattcgccttgtggggtaaacttgagctcaatcagcgcgatggctttttggattgcccgcatggtgaccgggtctgcggcagcgggatgatgagtaaagtcgatattcttcagctgactggacattttttcacgaacttcaacgggcgcgattacatcgagaacatccagaatttgtttgataaccaactggcaagcaaccacatcagaaaccagttcctgatcggcattcagcgtctgggacatcgtaaactcctgatagcattttgaaagccgttatagtagcggcttcacatcttcaacgatagtcacatccaccctcatcaggacacaaaaaaacctgccggagcaggttttttgttatcggaacatattgcctggcggtacgtctttgaacgtcttgcaatagttattgaacatacttttcaggattttgcgcagtttcatcgcggcactccgaccatttgttatacaggtgttattgtctttgcgcttataatatgacaaccatcacaaaaatcaatctttatgtgatacaaatcacataaatacccctttaatgttataaaaatgataatcaaagaacagccccctatttctgacacctacagatggcaagaaatagcgcctgccaggcgtcttttccggccattgtcgcagcgctgtaacgcgtaaaatagtgctttctcttactcttctggctggaccatgagacttctgattctgactctttcattaataacgctggcggggtgtacggttactcgccaggcccatgtgagcgaagttgacgcggcaacaggtattgtacggttggtttatgaccaggcttttttgcagcatgcccataccgatcgttatgtcagtcgcgggatctccgatcgcgcatgccaacaggaaggctatacccacgcgatcccctttggtcagccagtaggcaactgtagcctttttgcgggttccttatgtttgaatacggaattcactttgtcatatcagtgccatcattccgccttccctgtctttctctaaatattttaatcagcgaggggatcttcgctgattaaagaaatagcggtaatgcgttttattcccattcgtatttttaataattgaagtttatattttaccttttgcaannnntaaaataacaaattatagtgacgccacagcaacaaatataacctttgtggagcactatcatgctgaaaccagaaatgattgaaaaacttaatgagcagatgaacctggaactgtactcttcactgctttatcagcaaatgagcgcctggtgcagctatcataccttcgaaggtgctgccgcgttcctgcgccgtcacgcccaggaagagatgacgcatatgcagcgtctgtttgattacctgactgataccggcaatttaccgcgtattaataccgttgaatctccgtttgctgaatattcctcacttgatgaattattccaggaaacctataaacacgaacaattaatcacccagaaaattaacgaactggctcatgctgcaatgaccaatcaggactacccaacatttaatttcctgcagtggtatgtttctgagcagcatgaagaagagaaactgttcaaatcgattattgataaattaagcctggcaggcaaaagcggcgaaggtctgtattttatcgacaaagaactctctaccctcgacacacaaaactaatgctctccggcggcaggtttctgccgccatttcaaatcagtgacggcaaatcttactctgatcggtcgaaaaaccttcttctgaaggtataaatttgccttttgctgccagaaacgctaccagctctcccgctgtcatcccttctgccgagcaagtgtgaaaacgtgcctgttcaccaaaacgcgctttaatcgcagcttccagactggcatgcgtatattgctcgcctgattcaatcatcatatttaacacttcatgaccgtgaatagagtccatcgttcctcctcaaaaaaaagcctagcgtagcgattgccgcttatgaagactttgcgccagcgcaggactgaatgctttttattgtacatttatgtttacaccatatgtaacgtcggtttgacgaagcagccgttatgccttaacctgcgccgcagatatcactcataaagatcgtcaggacagaagaaagcgtgaaaaacagaaccctgggaagtgtttttatcgtggcgggaaccacaattggcgcaggcatgctggcaatgccgctggctgcggccggtgttggttttagcgttacgttaatcttgttgattgggctttgggcgttgatgtgctacacggcgctattactgctggaggtgtaccagcatgttccggcagataccggtctgggcacgctggcaaaacgctatctgggacgctacggtcaatggctgacgggcttcagtatgatgttcttaatgtatgctctgactgcggcatacatcagcggtgccggtgaattgttggcctccagcatcagcgactggacaggtatttcaatgtcggcaaccgctggcgtgttgttgttcacttttgttgccggtggcgtggtttgtgtcgggacatcgctggtcgatttatttaaccgttttctgttcagcgccaaaattatttntctggtggtgatgctggtattgctgctaccgcatattcacaaagtgaatcttttaaccctgccgttgcaacaggggctggcactgtctgcaatcccggtgatttttacgtcgtttggttttcacggtagcgtgccgagtattgtcagctatatggatggcaacattcgtaagctacgctgggtgtttataaccggtagtgcgatccccctggtggcatatattttctggcaggtggcgacgcttggcagcattgattcaacaacctttatgggattgctggctaatcatgccggattaaacgggctgttacaggcgttacgcgaaatggtggcctctccgcatgttgagctggcagtgcatttatttgctgatttagcccttgccacgtcatttctcggcgttgcgttaggcttatttgattatctggcagatttgtttcagcgttcaaataccgttggtggacgattgcaaactggagcaattacctttctgccaccgttggcgtttgcactgttttatccacgaggatttgtgatggcgctgggttacgccggtgtggcgctggcggtactggcattgattatcccttcgctgttgacctggcaaagcagaaagcacaatcctcaagcgggttaccgggtcaaaggtggtcgtccggcgctggtggtggtgtttctctgtggtattgctgtgattggcgtgcaatttttgattgcggcagggttgttaccagaagtggggtgattagatagcctcaaattccttattgggtgccagaattaacgctgacacccaatttgacttcttaatgcaggcagcactgcttaaattttttaccactaccgcacgggcaaggatcgttacgccccggtttctcttctgctttgatcggttgctgaacagctttttcctgcggatgcgccatccagtacgcatgtagatcaagcgccgccagtcgaatggcatctacgctctcttcaaacgcttctggcgacatcttctctacccgctcgaagttttcctcagtaccgtgcagcgctatcgcctccagcgctggttttaacgaatcgggcaatgttgaccagtcagaaagtgccacgccccgcatatagccaaagcaccactcctcaacaatcgtcagctcgctgccatcaacttctcgcaagccgaataacggctcaaactgctccgggaattcgttcagacgctctgcggtatcggccatatgttgaaaagccaggttcataaagcgcgtcatctctttctctgacgcccagcgcggcacatagtcagccccaccccacacggcaaccagccactgtgccggttcaatctcttgcggagaactcaacaccgccgtcaataaaccgtccagctccgccacatcaaggatggcgtggtcagtgttgtatttggtcagaatatcgtccagccattccaactcactttcgtttaacggtcccgttttcatacgcttttccttgtggatctcaactcgccagcacctatcttacatgccggtccgtatcagagatactttttgagtggctttgccggtgattaaaaatcaaggagggtgtaacgacaagttgcaggcacaaaaaaaccacccgaaggtggtttcacgacactgcttattgctttgattttattcttatctttcccatggtacccggagcgggacttgaacccgcacagcgcgaacgccgagggattttaaatcccttgtgtctaccgattccaccatccgggctcgggaagaaagtggaggcgcgttccggagtcgaaccggactagacggatttgcaatccgctacataaccgctttgttaacgcgccaaattcttcaggcctttcagccagacatccgctgacgccgatgtcttttaaactggagcgggaaacgagactcgaactcgcgaccccgaccttggcaaggtcgtgctctaccaactgagctattcccgcattcatcaagcaatcagttaatcacttgattttattatcgtctggcaatcagtgccgccgttcgatgcgttgcattctacttacctggcgcgatgagtcaacgatatttttcaccacttttgatcgtttgctgaaaattgcgccgaaacgatcactgatcaagcaaatctgcacgcgcagcgctcaaatattgcaacattgaccacagagtcagtaccgcagccacaaagaaaagtgcaataccggcgtactcaacccaaatgttcggacgccacagcagccatgccaacgccaccatctgggcagtggttttcactttcccaatccaggagacagccacgctactgcgtttacccaactccgccatccattcgcgtagcgcagaaataataatttcacgggcgatcatcgttgccgccggtaaggtcacccaccagctgtggtaatgctcggttaccagcaccatggcgatagccacgagaactttatctgctacagggtcaaggaaagcaccaaaccgggtactctggttccagcggcgtgccagaaaaccatcgaaccagtcagtcaccgccgcgacgcagaaaatgagcgcggcggcaaacggcgaccaggtgacaggcagataaaagaccaatacaaagaatgggataaggatgacacggaacagtgtaagcaacgtagggatattaaattgcataatgacgggtaactatctgttgtcagtaagattacccctatgttgctacagagacatcaatgtttcaacgaccagaagatcttttctgccagaccttgcgaaatacccggcacttttgcaatttcctcgacgctggcgttacgtaaaccttgcaaaccgcccatatatttcaacaacatttgccggcgttttggcccgacgccttcaatggtttccagggaactggtatttttgaccttcgcccgttttttacggtgcccgccaatcgcgtgatcgtgtgattcatcgcgaatatgctggataacatgcagcgcgggagaatctggcggcaaactgaatccctcaccttccggctcaaagaacagcgtttccagcccagccttacgatctgctcctttggcaacaccaagtagcagcggatgatttttatcccatgagacatccagttcggcgaagacatttttcgcctgcgcaagctggcctttgccgccgtcgataagtatcacatccgggatcttactgtcgtcgatggctttaccataacgccgacgcagcacctgattcatcgccgcataatcatcgcccggcgtgatgccagtaatgttatagcgccgatactccgcacgcagcgggccgttagcatcaaacaccacacaggaagcgacggtttgttcacccatggtatggctgatgtcaaagcactccatccgcttcacttccggcaatttcaacacgctggcaagtgctgtaagccgctggtgaacggtagattgctgcgaaagtttgctggttaaggccgtcgccgcattggtgcgcgcgagtttcaggtaacgcgccctatcgccacgaggtttggtttgaacattaatcttgcgtcccgccagttctgaaagggaatcggcgagcagcgttttatcgctaagattaaaatcgagcaggatctcacccggtaaggtgcgcatctggctgccttgtaaatagaactggcctacgaaggtttctaccacctcgctcagttccgtaccgccaggcactttcgggaaatagctgcggctgccgagcactttgccctgacgaatgaacaatacgtggacacaagccatacccgcatcgaacgccacaccaataacgtcgaggtcgtcgccggtattggaaacgaattgtttttcggtgacgcgtcgcaccgcctgaatttggtcgcgaatacgtgccgcttcttcaaactccagattctgactggcagtttccatacggctaatgagttgcgtaagcacctgatcatctttgccagacaaaaacaggcgcacatactcgacctgctgagcgtattcttcttcactcaccagtccttcaacgcacggtcccagacagcgccctatctgatattgcagacacggacgcgagcgattgcgataaacactattttcgcactggcgaatggggaaaatcttttgcagtagcgccagtgtttcacgtacggcatagccattcgggaacgggccgaaatattcacctttggcatgctttgcaccacgatgcatcgccagacgcgggtgggtatcgccactcaggaagataaaaggatatgatttatcatcgcgtagcaaaacgttgtaacgcggctgatagagtttgatgtagttgtgttccagcaacagcgcttcggtttctgtatgagtaaccgttacatcaatttgctggatctgggcgaccagcgcttcggttttgcgcgaagcgaggttgctacggaaatagctggaaagccgttttttcaggtctttcgctttgccgacatagataaccgtaccaccagcatcgtacatgcgataaacgccaggctggctggttacggttnnnnnnnacgcttttgcgtcaaactgatcactcactgacttgataatgtctccgcattacacagaccatggcgaattgccaggtgagtcagctcaacatcgccatgaatgtttagtttactgaacatacgatagcggtagctgttcaccgttttcggactgagattgagctgttctgagatctcattgaccttctggcccttcgtgatcatcagcataatctgcaattcacgttcagacaaactggcaaatgggctttctgttttttctggttcgatctggcttaatgccatttgttgagcgatgtcagaagcaatgtaacgctgcccagaatagacagaacggatcgcactcacgacttcctgcggagccgcgcctttgctgaggtagcccgcagcaccggcctgcatgactttcgctggtaaagggttttctgtatggacggtaagcatgatgatttttacatcagctgtggaacgcgcgattttacgcgtcgcctcaagaccgccaatgcccggcatactcatgtccattagcaccacgtcaacggcatttgcccggcaccacttaacggcgtcttcaccgcacgatgcctcaccgacgacttttataccctttatatcttccagaatgcgtcgtatccctgcgcgcaccagttcgtggtcatcaacaagtagaacgttgatcaaaggaatatctccagaaatagggataacgctactgatagttagtcattcgtatattagcggtttttattgcaactttgaaacgttaaaaatggtgggtattcgatttttctctcgtttttgtcaattcgattgtccacagttatggtcacgcccgtcaccaacggcttaccggatcgtttcacagtaagccctgcgacgaaatgtgacaaaaattacctttattcagcaaaaatgaaaatcagcccgctgaatatgtaacattaattaacccgaacaatacgggcaaaaaacattcatgataaaaatatttattggtcattatattaacgcatttaatagcaccgttgacggcacgctcaaaaaacaaccactgctatttttagcaaagcttatggtatactccgccgccttaacatttttcaccgcaaattttcattgcaacatgacgaggaaaataaatgagtacgcctgatttttctactgccgagaataatcaagaactggcaaatgaagtctcctgcctgaaagcgatgctgacgctgatgctgcaggcgatgggacaagctgacgcgggccgcgtgatgttaaagatggaaaaacagcttgcgctgatcgaagacgaaacccaggctgcagtattttccaaaacggttaagcaaattaaacaagcctaccgtcagtaatataaaaccggctgatagcgtgcctttcagccggtttttgcatctggcacgcaggacagaaaagagatcaaattaagccagtagnggccgcgtaacaggcaacctgggtcttatttggtgcattaatttttttctgcatgtttttctggtggaaattgaccgtattctcagagattgacaaaatcatcgctatctctgctgatgtcttcccttccgccgtccacctcagaatttctttttcgcgcttgctgaaattcatctctggcgtcatcactatttcatcatttaaacgcatcagagccatcagactttcgcgcaccagtaactgcatttttaattgcagttcatcactaagaatgggtatttcgcgcgcgctgcaacgggaaaaggacaaaaagcccagcgcccggtttggcagcattaaatactgagtgacaccgcggcgtaaaccatgtgnnnncgcggcttcccataacggctgtgcttcgttgaataagtcatcattccacattagatggccctgactaaagttttcagggttcagcaccggatcaattgcgagaaagttttttgcctgataataactaacccacgcctcagggtaattggtgtagaaagccactttaggtcgagtgaatggtaccgggtggcggacacataacgaatagtaatcgtactccagctgctgagcctgaagctcaatttcatggtagacctcttctgcggtctccatcctctgaaaacgcaacagcatcgtgcgacgccagctgaaaaaatccgtatcctgcatagtaaaccgcaacgcccctgagagtgagtatcatttataatgataattcaaactatcacataaataagatttannnnnnntttatattattcaggcaatgaattacttttgcaagccatcgcattctcttatgttattaatgagttatgctgatttgttaagcagttttatcaggcttgaaatggcgttccgccccgactgtcgaatcgtcggggctgattttttcttattattgcagcagaaacttctcgaggaactggcgggtgcgaggctgctcgggatcggcaaataacgcttttgcggccccctgctcgactatccgcccctggtccataaaaatcgcccggtccgcaacatcccgggcaaagctcatttcgtgtgtcacaatcaccattgtgcgcttttcctgcgccagctgacggatggtgttcaggacttcgcccaccagctctggatccagcgctgacgttggctcgtcaaacaaaatcacctcaggacgcattgccagcgcacgcgcaatcgcaacacgctgctgttgaccgccagacaaacgacgtggatagctggtttctttaccggccagcccaactttcgccaacagcttgcgagcgcgcgccgtggcctcttctttcggttcgcctttgacgatcaccggcccttcaataatgttctccagcaccgtacgatgcggaaacaaattaaagttctggaagacaaacccgacgtgctgacgcaactggcgaatcagcgatttttgctgacttaatgaacgtgcagtatcaatagtgatatcgccaacggtgatcgttcccgcttccggttgttccagcagatttatgctacgtagcaatgtggttttgccggaaccactcggaccgataattgccaccacttcgccaggctttacctcgaggtcgataccgtgcagcaccgtctgaccgtggaattttttcaccaggttcttaacttcaatggcactcatttgggttctctctcctggcgattaagttgattctcaaaatggttctgcaacgtcgataacacagtcgccatgatccagtagatgagcgaagccgccagatacatggtgaatacctccagcgtacgcgaggtaatcaactgcgcctgacggaacagctccggcacctggattgtcgcggccagcgacgtatcttttaccagactgataaagctgttcgacagcggcggcaacgccacccgcgccgcctgtggcaaaatcgcgcgacgcatagtctgccatggcgtcataccaatactggcagctgcttcccactgacctttatcaatagaagaaatggcggcgcgaagcgtttcggcagtataggcggcagtgttgagcgacagaccaatcattgctgacggaatgggatctaattcgataccaaactgcggcaggccgtaatagatcataaacagttgtgcgatgagcggcgtaccacgaaaaatagagatataaaaacgcgccagccagcgcacgggccanattggcgacaggcgcatcagcgcgagaataaaccctagcagtaaaccaaaaaacatgccgccgatactgagttgcagcgtatacccagcccctttcagcaggaacggcaaggaatcaataaccagttgtatactttcttgcatgagcgttcccggagctaaacgtggggatgataggcgaacagcgcaggcgcgccgccggtatgaataaacagaatcggcccttcatctttgaagcgtttctgactgataccgtcaatcagacccgccatcgcttttccggtatacacaggatcaagcagaatgccttccagccgcgccagcaatttcactgcttccatgccttcgtcgttcggcacgccgtagccaggtgcaaaatagtcatcccagagtaaaatttccgctgatgcggtcagctccagttctttcgcaatcgcctgttgtaggttaaccactttcggcaattgatcggcaacggaacgcgacacggtcacgccaatcagttcgctttcaggcatcaggtgttccagcccaacagccagtccggcgtgagttccggcactgcccgatgcgactaccaccgatgaaatattaaccgccccttcacactgttgcgcgatttccagcgcactctccacataacctagcgcgccaagagcattagaaccgccaaccggaatgacatacgggcgaaagccttgtgcttcgactcgcgtcgccagctcttccagttgggcattgggatcggtcagtgcgtcgcacatttcaatctgggtattgaacagatccagcaacaagcgattgccgttggttaaatagttttctgcggttgtgccaataggattttccagcagcgccacgcagtgcagaccgagtttggcagcgactgcggcagtctgccgcacatggttagactggatcgccccggcagtaatcagcgtatcggcaccttcacgcagagcatctgccgcgagaaattctagcttacgtaatttattgccgcccattgccatgggggtgacgtcatcccgtttgatgaaaatttcccgtcctagataatcagaaaagcgcggcagatattcgagcggcgttggcncgccgataaactccagccgtggaaaacgggttaaattatgcagtggcataacagcctccgatgtgtgttgttgtgattttctcattatgcacgctgaaaacgcgtaaataaaaaaggcgctagtgaaagcgcccttttttgtcattatgctgattatttggtcacatcagcaccaaaccatttttcggaaagggcttgcaaagtgccgtctttttgcatttccgcaattgcatcattcactgctttcagcaggtcttcatttcctttacgcagcgccacgccagactcctgacgggagaatgcttcaccggttactgccagcgtatcgttggttttcttcaccagatccagcgccgccagacgatcaacgaggatcgcatcgatacgccctacgcgcagatcctgatatttggtcgggtcatcatcataggtacgcacatcgacgccctgaacattctgccgcagccactcttcatagttggtgcccagaccgacccccacttttttgcctttcagatcatcggctgttttaatggtgccttcgttaccttttttcaccagcgcctgaataccagaaatggtgtacggggttgagaaatcgtattttttcttgcgctcatcagaaatggtgacctgattaatcaccacatcaatacgtttagagtccagcgacgccagcataccgtcccatttggtcggttttagtgacgcctcaacgccaagatgttttgccagctgttgggcaaattccacttcaaaaccggttaatttgccgtcatccccctgaaaactgaacggcggataagtaccttccagccctaccagcagcgtgccgcgctctttaactttattaagcagaccttcatctgcaaaacttttaacgctcatgcccgcaatcagcgctacggccatcacacccatcaatgcctgacgtcccagatgtgctaatttcatattcaccccgaatgttgttatgtctgtttgcagtgtagagccattgtttgtaaacacaaaaacaactccgctacatcttattcttatttaatatatatcagaagcaggcaggctggaggatttctgcacaagtccggtacaggtttggcgctgatagtgttgatacttccgtaacgcgatgcggtaattgttggtgctggtggtgggcagccacggggcgaggatttcatcaaggaaaccgtcctgcagctgatcgagggaaatattttgctcgtgtagatgattccccaaacggcgcagacgaacgacatattcacgcaccgtaccagggctcatttcagtttgctcaaaaagaaattgcttaaagccgataatatcgaaaaaatcactctgcgttttgcaatgtaaatcaccgcaaaatcggcacaatgccgcccatgatttttgttccgtttgccagccattttcatcaagcagcgtgtccaggcgggaaatctcgattttattcactattttgccgtcgcgaactaaggtaatgcgatcgagcaatttacggcaatgcgcgcaatgggtctggctgtgtttaaagtctttaagatagcggcttaatggccgtcttttcaggtgctgcaccatcattaagaactcctggtagtcaaagttaaagtgcggcatttactgacgttataacttacccagtttagtgcgtaaccgtttaatagcctggctgtgtaactgactgacccgcgattccccgacctccagcactgcaccaatctctttgagattcagctcttcctggtaatagagggttaataccagtttttcgcgctccggcaacgtttcgatagcttccatcacccgctggcgcagattactgtccagtagttgttgtagcgggttttctcgttgatgatcatcagtaaccaattcgatgctatcgccgtgctcttcgcgccactcatcgtaggagaagagctggctgttattggtgtcgagcaacatttggcgataatcggcaatatcgatccctaaacgttccgctacctcagtttccgtggcgttgcggccaagttcctgctccagttgccctattgcctgtgccacttcacgcgcgttgcgtcgcacgctgcgcggcacccagtcacggctgcgaagttcatccagcatagcgccacggatacgctgcactgcgtaagttgtaaatgccgttccttgtagggcgtcatagcgttcgacggcattaagtaacccaatgccgcccgcctgtagcagatcgtcaagttccacgctcgcgggcagtcgaacctgcaggcgcaatgcttcgtgacgcaccagcgggacataacgctgccacagcgagtgtttatccattacaccttcagcggtatagagtgaattcacgataaacagccctgcgttatatgagttatcggcatgattatccgtttctgcagggtttttaatcggacgattagtgggtgaaatgaggggttatttgggggttacaggtaaattccaggcagaaaaaaccccgccggtggcggggaagcacgttgctgacaaattgcgctttatgttgccggatgcggcgtaaacgccttatccggcctacaagnatgtnnnnnnnnnnnaaattgcaattcaacttgtaggcctgataagcgcagcgcatcaggcaatttggcgttgccgtcagtctcagttaatcaggttacaacgattaaccctgcagcagagacagaacctgctgcggtacctggttagcttttgccagcacggagttaccggcctgctgaatgatctgcgctttcgacatgttggacacttcggtcgcatagtcggcgtcctgaatacgggactgcgcttcggacaggttggtagtggtgttgttcaggttggtgactgcggaatccagacggttctggatagcacccagggaagaacggaatttgtcgatggagctgattgcgtcgtccagggcagcaagcgggttggtcgttgcagaaccagcactggtagtctcagtagtgattttacccgcggagttcacatttacagcagtaccaattgctggagcataatctttattggtatcagtcgctgaagcatacccggcaacagtcacagagccgttatccttgttaacgctgtaagagactgtatagtcggcaacgttagtgataccacctttatcatccacataagacttcgcagcatcactggattcacccgcggtaaacccaatagttttgctcagtacaccggaattaaaggtaattgaagatgtcgcggcagccgctttggtttcgctcaatactacatctttactcactgtagcctgataagtaatcccaccagggattaacggagctactggagtggttgtcgcaggagttgcttttgcgatggtatattctgtgccattgaatgtcagagaggcaccgtcactaccttcgctcgctgctttgancagcgctntcatatcagctttagctgcgctaccagcgttgttagtcgtcaagttgcctgcatcgtctacgtatgcctggcttccaccgatggtgatattacctgctgaatccgtttcgaaagaaacagtaccatcttttgtggtgtaagaaccattaacagatttacccacatcagcatgaagggtggcagctaacgcatcacgttttgaagctgaatcagcagcctgcgccgcggcgtctacacccgtaccagcagtagatttagtggtagtaaaatcaccagatttagcgttgtaagtataatctacgccgccaactgtgactttatcgccattccctaatttatcgaatgcagcatcggtagttaacaaggtattttcggttttcagatcataaagacctgtcgtggtgtttaacttcgcgccagcagaagttaaatcacttaccgttgcagctttgttggtaatagtacctttaccatttacgttaaagccattcagacccagagtatcagaatcgatttttttcaggtcgatcgtgatggtttcgccgtcattcgcaccaacctgaattttcattgaaccgtctttcgccagcacgttcacgccgttgaactgggtctggccggatacgcggtcaatttcatcaagacgagatttgatttcgtcctggatggagtccaggtcagaatcggagttagtccctgtagtggcctgaaccgtcagttcacgaatacgctgtaagttgttgttgatttcggacagcgcgccttcggtggtctgcgcaacagaaataccgtcgttggcgttacgggccgcctgagtcaggcctttaatgttagaagtaaaacggttagcaatcgcctgacctgcggcgtcatccttcgcgctgttaatacgcaagccagaagacagacgctcgatagaactcgacagcgcagactggttcttgttgatattattttgagtgatcagcgagaggctgttggtattaatgacttgtgccatgattcgttatcctatattgcaagtcgttgattacgtattgggtttccccccgtcggctcaatcgccgtcaaacctgttatcgtctgtcgtaaaacaacctttagaatttttttcacaaacagccattttttgttagtcgccgaaatactcttttctctgccccttattcccgctattaaaaaaaacaattaaacgtaaactttgcgcaattcaggccgataaccccggtattcgttttacgtgtcgaatgataaaaggaaatcgcatggcaagtatttcatcgctgggagtcgggtcaggtctggatttaagttcaatccttgatagcctcaccgccgcgcaaaaagcgacgctaacccccatttcaaatcagcaatcgtcgtttaccgctaaacttagcgcctacggtacgctgaaaagcgcgctgacgactttccagaccgccaatactgcattgtctaaagccgatcttttttccgccaccagcagcaccaccgcgttcagtgccaccaccgcgggtaacgccatcgccgggaaatacaccatcagcgtcacccatctggcgcaggcgcaaaccctgaccacgcgcaccaccagagacgatacgaaaacggcgatcgccaccagcgacagtaaactcaccattcaacaaggcggcgacaaagatccgattaccattgatatcagcgcggctaactcgtcgttaagcgggatccgtgatgccatcaacaacgcaaaagcaggtgttagcgcgagcatcattaacgtgggtaacggtgattatcgtctgtcagtcacatcaaatgacaccggccttgacaatgcgatgacgctctcggttagcggtgatgatgcgctacaaagttttatgggctatgacgccagtgccagcagcaacggcatggaggtctcggtcgccgcccagaatgcgcagctgacggtcaacaacgtcgccattgagaacagcagcaacaccatcagcgacgcgctggaaaacatcaccctgaacctgaacgatgtcaccacgggcaaccagacgctaaccatcactcaggacacctccaaagcgcaaacggcgattaaagattgggtgaatgtctataactcgctaatagataccttcagcagcctgaccaaatacaccgccgtagatgcgggagctgatagccagagttctagcaatggcgcactgctcggcgactccacgctgcggacgattcagacgcagttgaagtcgatgctgagtaataccgtcagttcttccagctataaaacgttggcgcagattggtatcacgaccgatcccagcgatggcaaactggaattggatgccgacaaactcaccgctgcactgaaaaaagatgccagcggcgtaggtgcattgattgttggcgatggtaaaaaaaccggcatcacgaccaccatcggcagcaacctgaccagttggctttcgacaacgggcattattaaagccgctaccgatggcgttagtaagaccctgaataaattaactaaagactacaacgccgccagcgatcgcattgacgcgcaggtcgcgcgctacaaagaacaatttacccaactggacgttttaatgacctcgttaaacagcacaagcagctacttaacgcagcagttcgaaaacaacagtaattccaagtaatcattattcatcgggagacaggtcatgtncgcggcaaaaggcacccaagcctatgcacaaattggcgtcgaaagcgccgtaatgagcgccagccagcagcagctggtcaccatgctatttgatggagtgctgagcgcactggttagagcgcgcctgtttatgcaggacaacaatcagcaaggcaaaggcgtntctttgtcaaaagcgatcaacatcattgagaacggactgcgggtgagtcttgatgaagagagcaaagacgaactaacccaaaacttgattgctctttatagctatatggtcaggcgtttgctgcaagccaatttacgcaacgatgtctccgcagtcgaagaagtggaaacannaatgcnnnnnattgccgatgcctggaaagagtcgttactctccccttctttgattcaggacccagtctgatgaaccatgcaccgcatttatatttcgcctggcaacaactcgtcgaaaaaagccagctcatgttacgcctggcaacggaagaacaatgggacaaactcatcgccagcgaaatggcgtatgttaatgcggtgcaggagattgcacatttgactgaagaggttgacccgtccaccacgatgcaggagcagctccgcccgatgctgcgcctgattctcgacaacgaaagcaaggtaaagcagttattacagattcggatggatgaactggcgaaactggtcggtcagtcatcggtgcaaaaatcggtgttgagtgcctatggcgatcagggcggctttgtgctggctccgcaggataacctcttttgaatctgaatgagtcgatggctcgcgaataatccgattacggctacgcttctaatgttccccttgaatggagtcgaagaatgcgtaatcccacgctgttacaatgttttcactggtattacccggaaggcggtaagctctggcctgaattggccgagcgcgccgacggttttaatgatattggtatcaatatggtctggttgccgcccgcctataaaggcgcatcgggcgggtattcggtcggctacgactcctatgatttatttgatttaggtgagtttgatcagaaaggcagcatccctactaaatatggcgataaagtacaactgctggccgccattgacgccctgaaacgtaatgacattgcggtgctgttggacgtggtagtcaaccacaaaatgggcgcggatgaaaaagaagctattcgcgtgcagcgcgttaatgctgatgaccgtacgcaaattgatgaagaaatcattgaatgcgaaggctggacgcgttacaccttccccgctcgtgccgggcaatactcacagtttatctgggatttcaaatgttttagcggtatcgaccatatcgaaaaccccaatgaagatggcatttttaaaattgttaacgactacaccggcgaaggctggaacgatcaggttgatgatgaactcggtaatttcgattatctgatgggcgagaatatcgattttcgcaatcatgccgtgacggaagagattaaatactgggcgcgctgggtgatggaacaaacgcaatgcgacggttttcgtcttgatgcggtcaaacatattccagcctggttttataaagagtggatcgaacacgtacaggaagttgcgccaaagccgctgtttattgtggcggagtactggtcgcatgaagttgataagctgcaaacgtatattgatcaggtggaaggcaaaaccatgctgtttgatgcgccgctgcagatgaaattccatgaagcatcgcgcatgggacgcaantacgacatgacgcagattttcactgggacgctggtggaagccgatcnttttcacgccgtaaccntcgttgccaaccangacacccaacngttgcaagccctcgaagcaccggtcgaaccgtggtttaaaccgctggcgtatgctctaattttgttgcgggaaaatggcgttccttcggtgttctatccggacctctacggtgcgcattacgaagatgtcggtggtgacgggcaaacctatccgatagatatgccaataatcgaacagcttgatgagttaattctcgcccgtcagcgtttcgcccacggtgtacagacgttatttttcgaccatccgaactgcattgcctttagccgcagtggcaccgacgaatatcccggctgcgtggtggtcatgtcgaacggagatgatggcgaaaaaaccattcatttaggagagaattacggcaataaaacctggcgtgattttcttgggaaccggcaagagagtgtagtaaccgacgaaaacggcgaagcgaccttcttttgcaacggcggcagcgttagcgtgtgggttatcgaagaggtgctttaaattcatccccggcggcaagccggggagatttcattacggcaatggcgtcggtaacggcgctttatccagcgcagcggcacactctgccgtcgggcgatccacacgctccatcgtcataccatcgtactcaatggtgttaccgtcacgctcaacctcgtacagctcacgttttacggtaacgttagtgagatcatcagacatcaatgtcaacttgcccggcacagcaatcacccgctgccactgacggcaatctagggtatcgccctctttagtgacaatcaggctgcctatcgcttccgggctgaccagcgcacgttgcggccctttggtctgccagtagcccgccagccagtccggcgcgggggttttcacgacattgttatagttttcgacttcggcacagcccgccagcaacatgagcgcgcctgcaattgngagttttttcatcattcgtcctgcatgagaagaaaagaggattgtggcattaaagccctgatgtcgccagcctttccaggttcagagagaaatttgatctaactattatttttgtgaattattaccccgaaaataaatttgcatggtgtatgattcgcgactcttgtttcaaaccttctgagttcagaggctacattcatgtcatggcagcaattcaaacacgcctggttgattaaattctgggcgcccatccccgcggtcatcgcggcgggtattctctccacttactattttggcatcactggcaccttttgggctgtcacgggtgaatttacccgttggggcggtcagctcctgcagctgttcggcgtccatgctgaagagtggggttattttaaaattatccatctggaaggatcgccattaacccgcatcgacgggatgatgatcctcggtatgtttggcggctgctttgccncagcgctgtgggccaacaatgtcaaactacgcatgccgagtagccgtatccgcattatgcaggccattattggcggcattatcgccggttttggngcgcgtctggcaatgggctgtaacctggcggcattctttaccggtattcctcagttctcgctgcatgcctggttctttgccatcgccactgccattggttcatggtttggcgcgcgctttaccctgctgcccatcttccgtattcccgtgaaaatgcagaaagttgctgccgcctcaccgctgacgcaaaaaccggatcaggcgcggcgtcgttttcgtctcgggatgctggtctttttcggcatgctgggctgggcgctgctcacagcgatgaaccaacccaaactggggctggcaatgctgtttggcgtcggctttggtttactgattgaacgtgcgcaaatctgctttacttcggcgttccgcgatatgtggatcaccggacgtacccatatggcgaaagcaatcattattggtatggcggtgagtgccatcgggatcttcagttacgtacagttaggcgttgaacccaaaatcatgtgggcgggaccaaacgcggtaattggtggtttactgtttggttttggcatcgtgctggctggcggctgcgaaaccggctggatgtaccgcgcggtagaaggccaggtgcactactggtgggtcggtctgggcaatgtgatcggctcaacgattctggcgtattactgggatgatttcgctccggcgctggccaccgactgggacaaaatcaacttgctgaaaacctttggtccgatggggggcctgctggtgacatatttgctgttgtttgctgcgctgatgttgattatcggctgggaaaaacgcttcttccgccgtgcggcaccgcagactgctaaggagatcgcatgaaaaatatcgttcctgattaccgccttgatatggtgggtgaaccctgcccttatccggcagtcgcaacccttgaggcgatgccgcagttaaaaaaaggggaaatcctggaagtggtgagcgactgtccgcagtcgatcaataatattccactggatgcgcgtaatcacggctatacggtgctggatattcagcaagacgggccgaccattcgttatttaattcagaagtaatccctcattcccgctgtgacccacagcgggaacatcgttacctttgtatcacatagattttacccgccccctctcctattcttttcagtatgatctcaggaggtttctatgtgtggacgctttgcccaatcccaaacgcgtgaagattaccttgcgcttctcgcggaagatattgaacgcgatattccctatgatcccgaacccattggcagatacaacgtcgcgccgggaaccaaagtcctactgctcagtgaacgtgatgaacaccttcatctggatccggttttctggggatatgctcccggatggtgggataaaccgccgctgattaacgcccgcgtagaaactgcggcaaccagtcgtatgtttaaaccgctctggcaacatggtcgggcaatctgttttgccgatggctggtttgagtggaaaaaagaaggcgacaaaaagcagccttattttatctatcgtgctgatggacaacctgtttttatggcagcgataggcagcacaccgttcgagcgcggtgacgaagccgaaggatttttgattgtcactgcagcagcagaccagggtctggtagatattcatgaccgccgcccgctggttctgtcgccagaagctgcgcgggaatggatgcggcaagagattagcggtaaagaagcctcagaaatcgcggccagtggctgtgttccagcaaaccagttctcctggcacccggtatcgcgcgcggtgggtaatgttaaaaaccagggtgcggagttaattcaacctgtttgataagcctggagattattgatcaacaatactgcgtcataagtaatctctattagacaaagatttcattacctgttggcatattgcaaaaataacaccaatacggaatcgtcatgttcacgattaaaacagatgatctcacccatccagcagtgcaagcattagtggcttaccatatttccggcatgctgcagcagtctccccctgaaagcagtcatgctttagacgtgcaaaaattacgtaacccgacagtgacattctggtcagtatgggaaggcgaacaactcgcaggaattggtgcgctgaagttgctggatgataaacatggcgaactgaaatcaatgcggaccgcgccaaattntttacgtcggggtgtcgccagtctgattttacgccacattttgcaggtcgcccatgacagatgccttcatcgcctgagtttagaaacgggtacacaggctggatttacggcctgccatcaactttatttgaagcatggtttcgttgattgcgaaccgtttgccgattatcaacttgatccacacagtcgatttttgtcattgacgctatgcgaagataatgagttgctttgagccagacgcagcacattcttgcattcgacgtgctgcgtctttatttatcaccaacaggaaacgccttgtccatagacgccccttccacatgcgtcacaagaaacctctattccagtgacacaattacgcctaattaattacatataanatttaattatgaattcctcaccatctattacatgctttttaaccatatcggaatatttatcataatcggcgggattcataacaatatattttcgctgcgatatttcatagcgaatccctgtaagggtccatggcattaaaaatgcctctttaataggattacattccatacaaagtaattttaaattgccaggtatcgcaggaataacctcaatcttattatattcaatatacgcttctttcaaatttttggggaaccatctaatttctttaatattattctcactacaatcaaaaaccttagcggtgtctggtagtgctggtatttccgatagcttattgtgacaaataaaaattttcttagcctttggcggaaatgagtcaatatacgatatcaggttattatttacggagatcagggtaattccatcaggtacttgtggaaattctgtaaggttattgaaatcgagttctaattctttgcatgattcgggcacctgtattgaatcaagttcattataaacaaggctaagcatttcaatccactcnggaagaggcggcacagaacccaaaganaggcttgataagtnaagttcattactgtgaagcttaacacatttaaacattctcaccaangctctatccacattttctttcaagtcattcgatgcgccttctttgactgaactagcccagtcactgaaacctttgcaaagcctggcatctgtaattttggttaacttgtccagcaactctgcaatattggtcgatataaactctaatttatgccgaatgggtaaagtcccctccccctgacttttttctatcgtgatagatcccgtcttatcataagccccataattttcaaacaatagagtataattaccccacctgaaacattgctctctcaataacttaaattcagacagcatattcagtaagttgcngtcttcactaactggtgtaaacttatcatttccaagacaactgactaactcacttgataattcatttatgattgcatcatcagatactaactcgtgttgttttatcgtagactcagtattcgatgtgattttatttaatcgaaccgactgagtttttaacgacagatcatttaatggaaacatttacactcctgtttaataaattatattgcccagnncgnnnnctaaaacacaataaaattgccactatcaaaaatcgctcatttttataacgcagtatattaataaaaataagaacgaagattaagttatccagaggttactgttgcgtctgtggtcgtaacaacatccgacgtggtgatgtgtcaaatgagacattctgatgatcagagggtttatcgcgtatacggatcgtgggtggcagaaaactttcagaatcaggtttccattttaaaccagaaattgagtgagtttgccccatccataaccccacgcggtgagatcggatgtcattaaacaagccaggtcaacaggtcagtatgggaaggcgaacaactcgcaggaatgggtgcnctaaagttgctggatgataaacatggcgaactgaaatcaatgcgtaccgcgccaaattatttacgtcggggtgtcgccagtctgattttacgccacattttgcaggtcgcccatgacagatgccttcatcgcctgagnttagaaacgggtacacaggctggatttacggcctgccatcaactttatttgaagcatggtttcgttgattgcgaaccgtttgctgattatcaatttgatccacacagtcgatttttgtcattgacgctatgcgaagataatgaattgccatgagccagacgcagcgcattcttgcattcgacgtgctgcgcctttatttatcaccagcaggaaacgccttgtccatagacgctccttccacatgcgtcacaagaaacctctattccagtgacacaattacgcctaattnattacataaaatatttaattatgagttcctcaccatctattacatgctttttaaccatatcggaatatttatcataatcagctggattcgtaacaatatattttcgctgcgatatttcatagcagatccctgtcagagtccatggcattaaaaatgcctctttaataggattacattccataaaaagtatttttaaattgccaggtatcgcaggaacaacctcaatattattatatccaatacgcgcttctttcagatttttggggaagtatcgaatttcttgtatcttattatagccacaatcaaaaaccttagcggtgtctggtattgctggtgtttccgatagcttattgtgactaannnnaattttcttagcctttggcggaaatgagtcaatatgcgatatcaggttattatttacggagatcagggtaattccatcaggtacttgtggaaattctgtaaggttattgaaatcgagttctaattctttgcatgattcgggaacctgtattgaatcaagttcattataaacaaggctaagcatttcaatccaatctggaagaggcggcacagaacccaaaaataggtatgataagtcaagttcattactgtgaagcttaacacatttaaacattctcaccaacgctctatctacattttctttgaggtcattcgatccgccttctttgactgaactagcccagtcactgaagcctttgcaaagtctggcatctgtaattttcgttaacttgtccagcaactctgcaatattagtcgatataaactctaatttatgccgaatgggtaaagtcccctccccctgatttttttctatcgtgatagaccccgtcttatcataagcctcataattttcaaacaatagagtataattaccccacctgaaacattgctctctcaataacttaaattcagacagcatattcagtaagttgctgtcttcactaactggtgtaaacttatcatttccaagacaactgactaactcacttgataattcatttatgattgcatcatcagatactaactcgtgttgttttatcgtagactcagtattcgatgtgattttatttaattgaaccgactgagtttttaacgacagatcatttaatggaaacatttacactcctgtttaataaattatattgcccagggsgcattctaaaacacaataaaattaccactatcaaaaatcgctcatatccatagcccggaacatgaataaaaacatcaacaaagattaaattatccagaggttactgttgcgtctgtggtcgtaacaacatccgacgtggtgatgtgtcaaatgagacactctgatgttcagggggtttatcgtgtatacggatcgtggatggcagaaaactttcaggatcaggtatccatttcaaaccagataatgagtaagtttgccccatccatgccccacgcggtgagatcggatgtcattaacaacaggttacacaacctatacctgcatgctcattacttcctgatatgccgccaccagcttattacgcacctgaatccccatttgcatagaaactgaggctttttgcatatcggtcatcacatcgtttaacgccacgccgggttcaccgagagtgaatttttctgcctgcgtgcgggcggctgtttgtgtatcgcttatgcgatcgagcgcggcgtgcagctgcccggcaaaactaatggtcggttgcggcagtgattcctgcgcacgcgcactcatcgccgtagcctgtaactggctgataaccccttcaatcccctgtatcgctgacattttcatctcctggataatttctggtagcaaagcctaccagtaagtcaataagacaaaggcgctaaatagcaacaaaaaaacgggtttattggcggatagaaaaaaacgaaagcacaaataatgggagcgtcaatttttcgagtttgctgacccgggagtgagtcttgttccactttgccaataacgccgtccataatcagccacgaggtgcgcgatgaatgcgactgcagcccagacaaaatctcttgagtggcttaatcgcctgcgtgcgaatccgaaaattccattgattgttgccggttccgcggcagtggcggtcatggtcgcactgatcctgtgggcgaaagcccccgactaccgcacattattcagcaatctttccgatcaggatggtggcgcaattgtcagccaactgacgcaaatgaatattccttaccgcttcagcgaagccagcggcgctattgaagttccggcagataaagttcacgagctgcgcctgcgcctggcgcaacaaggtttgcccaaaggcggcgcggtcggtttcgaactactcgatcaggaaaagtttggtatcagccagttcagcgaacaggtgaattatcagcgggcgctggaaggcgagctttctcgtaccatcgaaactatcggcccggtaaaaggggcgcgcgtacatctggcaatgccgaaaccgtctttattcgtccgtgaacaaaaatccccttctgcatcggtgacggtaaatctgttacccggccgcgcactcgatgaagggcaaattagcgccattgtgcatctggtttccagcgccgttgctggtctgccgccgggaaacgtcacgctggtggatcagggcggacatctgttaacccagtccaataccagcgggcgcgatcttaatgacgctcaattgaaatatgccagcgatgtcgaaggccgtattcagcggcgtattgaagcaatcctgtcgcctattgttggtaacggtaatattcacgcccaggtcacggcgcaactggacttcgccagtaaagaacaaacggaagaacagtatcgccctaatggtgatgaatctcaggcggcgcttcgttcacgccagcttaatgagagcgagcaaagcggttccggttatccgggcggcgtaccgggggcgttgtcgaatcaaccggctcctgcgaataacgcgccaatcagcacgcctccggcaaatcaaaataaccgccagcagcaggcgagcaccaccagcaatagtgggccgcgtagcacacagcggaatgaaaccagtaactacgaagtcgatcgcactattcgtcataccaaaatgaacgtgggcgatgtgcaacgtctgtcagtcgcggtagtggtgaattacaaaaccttgccagacggtaaaccattgcctctcagcaacgaacagatgaaacaaattgaagatctgacccgcgaggcgatgggcttttctgaaaaacgcggtgactcgctcaatgtcgttaactcgccgttcaatagtagtgacgaaagcggcggagaactgccgttctggcaacagcaagcgtttatcgatcagttactggctgccggtcgctggttgctggtactgctggtggcgtggctgctgtggcgtaaagcggtacgcccgcagctaacacgtcgcgctgaggcgatgaaagctgtacagcaacaggcgcaggcccgcgaggaagtggaagatgcggtggaagtccgcctgagcaaagacgaacaactccaacaacggcgcgctaaccaacgtctgggggcagaagtcatgagccagcgtatccgtgaaatgtctgataacgatccgcgcgtggtggcgctggtcattcgccagtggataaataacgatcatgagtaacctgacaggcaccgataaaagcgtcatcctgctgatgaccattggcgaagaccgggcggcagaagtgttcaagcacctctcccagcgcgaggtgcaaaccctgagcgctgcaatggcgaacgtcacgcagatctccaacaagcagctaaccgatgtgctggcggagtttgagcaagaagctgaacagtttgccgcactgaatatcaacgccaacgattatntgcgttcggtattggtcaaagctctgggtgaggaacgtgccgccagcctgctggaagatattctcgaaactcgcgataccgccagcggtattgaaacgctcaactttatggagccgcagagcgccgccgatctgattcgtgatgagcatccgcaaattatcgccaccattctggtgcatctgaagcgcgcccaggccgccgatattctggcgttgttcgatgaacgtctgcgccacgacgtgatgttgcgtatcgccacctttggcggcgtgcagccagccgcgctggcggaactgaccgaagtactgaatggcttgctcgacggtcagaatctcaagcgcagcaaaatgggcggcgtgagaacggcagccgaaattatcaacctgatgaaaactcagcaggaagaagccgttattaccgccgtgcgtgaattcgacggcgagctggcgcagaaaatcatcgacgagatgttcctgttcgaaaatctggtggatgtcgacgatcgcagcattcagcgtctgttgcaggaagtggattccgaatcgctgttgatcgcgctgaaaggggccgagcagccactgcgcgagaaattcctgcgcaatatgtcgcagcgtgccgccgatattctgcgcgacgatctcgccaaccgtggtccggtgcgtctgtcgcaggtggaaaacgaacagaaagcgattctgctgattgtgcgccgccttgccgaaactggcgagatggtaattggcagcggcgaggatacctatgtctgataatctgccctggaaaacctggacgccggacgatctcgcgccaccacaggcagagtttgtgcccatggtcgagtcggaagaaaccatcattgaagaggctgaacccagccttgagcagcaactggcgcaactgcaaatgcaggcccatgagcaaggttatcaggcgggtattgccgaaggtcgccagcaaggtcataagcagggctatcaggaaggactggcccaggggctggagcaaggtctggcagaggcgaagtctcaacaagcgccaattcatgcccggatgcagcaactggtcagcgaatttcaaactacccttgatgcacttgatagtgtgatagcgtcgcgcctgatgcagatggcgctggaggcggcacgtcaggtcatcggtcagacgccaacggtggataactcggcactgatcaaacagatccaacagttgttgcagcaagaaccgttattcagcggtaaaccacagctgcgcgtgcacccggatgatctgcaacgtgtggatgatatgctcggcgctaccttaagtttgcatggctggcgcttgcggggcgatcccaccctccatcctggcggctgtaaagtctccgccgatgaaggcgatctcgacgccagtgtcgccactcgctggcaagaactctgccgtctggcagcaccaggagtggtgnnnnnnnnnnnnnnnnnnnnnnnnggcaagaactctgccgtnnngnngcnccaggagtggtgtaatgaccacgcgcctgactcgctggctaaccacgctggataactttgaagccaaaatggcgcagttgcctgcggtacgtcgctacgggcgattaacccgcgctaccgggctggtgctggaagccaccggattacaattgccgctcggntcaacctgtgtcattgaacgccagaacggcagcgaaacgcacgaagtagaaagcgaagtcgttgcctttaacggtcaacggctgtttttaatgccgctggaggaagtggaaggtgtcctgcccggcgcgcgggtttatgccaaaaacatttcggctgaaggactgcaaagcggcaagcagttgccgctcggtccggcgttattaggtcgcgttctggacggcagcggtaaaccgctcgatggcctgccctcccccgatacgacggaaaccggtgcgctgattaccccgccatttaacccgttgcaacgtacaccgattgaacatgtgctggacaccggcgtgcgcccaatcaatgccctgcttaccgttgggcgtgggcagcgtatggggctgtttgccgggtccggcgttggtaaaagtgtgctgctggggatgatggcacgttacacccgcgccgatgtcattgtcgtgggtttgattggtgaacgtgggcgcgaagtaaaagattttattgagaatatcctcggtgccgaagggcgtgcacgatcagtggtgattgccgctccggcggatgtgtctccgctcctgcgaatgcaaggtgccgcctatgccacgcgcattgccgaagattttcgcgatcgtggtcagcatgtgttgctgattatggactccctcacccgctacgcgatggcccagcgtgaaattgcgctggcgattggcgaaccacccgccaccaaaggttatccaccgtcggtgtttgccaaattaccggcactggtcgagcgtgccggaaatggcattagcggcggcggctcgattaccgcgttttataccgtgcttactgaaggcgatgaccagcaggaccccattgcagactccgcgcgggcgatcctcgacggtcacattgtgctgtctcgccgactggcggaagccgggcactatccggctatcgatattgaagcgtcgatcagccgcgcaatgacggcgttgatcagtgagcaacattacgcgcgagtncnnnncttcaaacagctgttgtcgagttttcagcgtaaccgcgatctggttagcgtcggcgcgtatgccaaaggcagcgatccgatgctcgacaaagccatcgccctgtggccgcagctggagggctatttgcaacaaggcatttttgaacgcgcggactgggaagcgtctctccaggggctggagcgtattttcccgacagtgtcataacccaggagataacggcagatggcagaacatggcgcgctggcgaccctgaaagatctggcagaaaaagaggtagaggatgccgcgcgcctgctgggtgaaatgcgtcgcgggtgtcagcaggcggaagaacagctcaaaatgctgatcgattatcagaatgaatatcgcaataacctcaacagcgatatgagtgccgggatgaccagcaaccgctggatcaactatcagcagtttatccagacgctggaaaaagccattactcagcatcgccagcaacttaatcagtggacgcagaaagttgacattgccctgaacagctggcgagaaaagaaacaacgtttgcaggcctggcagacactgcaggaacggcaatccacggcggcactgcttgcagaaaaccgcctcgatcagaaaaagatggatgagttcgcccagcgcgccgccatgaggaaacctgaatgattcgcttagcgcccttgattaccgccgacgttgacaccaccacattgcctggcggcaaagccagcgatgctgcacaagattttctcgcgttgttgagcgaagcattagcaggcgagacaactaccgacaaagcggccccccagttgctggtggcaacagataagcccacgacaaaaggcgagccgctgatcagcgatattgtttccgacgcgcaacaagctaatttactgatccctgtggatgaaacaccgcctgtcatcaacgacgaacaatccacatcaacaccgttaaccaccgctcagacgatggcgttggctgcggtggctgacaaaaatacgacaaaagacgaaaaagcggatgatctgaatgaagangtcaccgcaagcctgagcgccctttttgcgatgttgccgggttttgacaatacgcccaaagtgactgatgtgccgtcaaccgtgttaccggcagagaaaccaacgctnttcacaaaactgacttctgcgcaactcacaacagcacagcctgatgatgcccccggcacaccagctcagccattaacaccgctggtagcagaagcccagagtaaagcggaagtcatcagcacgccttcgccggtgactgctgccgccagcccgctaatcactccacaccagacacagccactgcccaccgtcgccgcgcctgttttgagtgcaccgctgggttctcacgaatggcaacaatcattaagccagcatatttcgctgttcacccgccaggggcaacaaagtgcagagttgcgtctgcacccgcaggatttaggtgaagtgcaaatctccctcaaagtggatgataaccaggcgcaaatccagatggtttcatcgcatcagcatgtacgcgccgccctagaagcagcgctgccggtactgcgtacgcagctggccgaaagtggcattcagttagggcaaagcaacatcagtggcgaaagctttagtggtcagcagcaggccgcttcccaacaacagcaaagccaacgcacagtaaaccatgaacctctggcgggggaagacgacnatacgcttccggttcccgtctctttacaagggcgcgtaacaggcaacagcggcgttgatattttcgcctaacgtcagaggtagcaccgtaatccgcgtcttttccccgctttgttgcgctcaagacgcaggataattagccgataagcagtagcgacacaggaagacccgcaacacatgactgattacgcgataagcaagaaaagcaagcgatcgctttggatcccgattctggtattcattaccctcgcggcctgtgccagcgcaggttacagctactggcattcgcatcaggttgctgctgacgacaaagcgcagcaacgcgtcgtgccctccccggtcttctatgcgctggatacctttacggtcaatctgggcgatgcggatcgcgtgctttatatcggcataaccctgcgcctgaaagatgaagctacccgctcgcggctgagtgagtatttgccggaagtccgtagccgtttgctgttactgttttcgcgtcaggatgctgccgtactggcgacagaagaaggcaagaaaaacctgattgccgagattaaaaccacactttccaccccgcttgttgccgggcaaccgaaacaggatgtcaccgacgtgctgtataccgcttttattctgcgataacgacatgggcgatagtattctttctcaagctgaaattgatgcgctgttgaatggtgacagcgaagtcaaagacgaaccgacagccagtgttagcggcgaaagtgacattcgtccgtacgatccgaatacccaacgacgggttgtgcgcgaacgtttgcaggcgctggaaatcattaatgagcgctttgcccgccattttcgtatggggctgttcaacctgctgcgtcgtagcccggatataaccgtcgggnccatccgcattcagccgtaccatgaatttgcccgcaacctgccggtgccgaccaacctgaaccttatccatctaaaaccgctgcgcngcactgggctggtggtgttctcaccgagtctggtgtttatcgccgtggataacctgtttggcggcgatggacgcttcccgaccaaagtggaaggtcgcgagtttacccataccgaacagcgcgtcatcaaccgcatgttgaaactggcgcttgaaggctatagcgacgcatggaaggcgattaatccgctggaagttgagtacgtgcgttcggaaatgcaggtgaaatttaccaatatcaccacctcgccgaacgacattgtggttaacacgccgttccatgtggagattggcaacctgaccggcgaatttaatatctgcctgccattcagcatgatcgagccgctacgggaattgttggttaacccgccgctggaaaactcgcgtaatgaagatcagaactggcgcgataacctggtgcgccaggtgcagcattcacagctggagctggtcgccaactttgccgatatctcgctacgcctgtcgcagatnttaaaactgaaacccggtgacgtcctgccgatagaaaaacccgaccgcatcatcgcccatgttgacggcgtcccggtgctgaccagtcagtacggcactctcaacggtcagtatgcgttacggatagaacatttgattaacccgattttaaattctctgaacgaggaacagcccaaatgagtgacatgaataatccggccgatgacaacaacggcgcaatggacgatctgtgggctgaagcgttgagcgaacaaaaatcaaccagcagcaaaagcgctgccgacgcggtgttccagcaatttggcggtggtgatgtcagcggaacgttgcaggatatcgacctgattatggatattccggtcaagctgaccgtcgagctgggccgcacacgaatgaccatcaaagagctgttgcgtctgacgcaagggtccgtcgtggcgctggacggtctggcgggcgaaccactggatattctgatcaacggttatttaatcgcccagggcgaagtggtggtcgttgccgataaatatggcgtgcggatcaccgatatcattactccgtctgagcgaatgcgccgcctgagccgttagtgatgaataaccacgctactgtgcaatcttccgcgccggtttctgctgcgccactgctgcaggtgagcggcgcactcatcgccattattgccctgatcctcgctgctgcctggctggtaaaacggttgggatttgccccgaaacgcactggcgttaacggtctgaaaattagcgccagtgcttcgctgggcgcgcgtgaacgggttgtggtggtcgatgtggaagatgcacggctggtgctcggcgttaccgcagggcaaatcaatctgctgcataaacttcccccttcagcaccaacagaagagataccgcagaccgattttcagtcggtcatgaaaaatttgcttaagcgtagcgggagatcctgatgcgtcgtttattgtctgtcgcacctgtccttctctggctgattacgcccctcgccttcgcgcaactgccgggtatcaccagccagccgctgcctggcggtggacaaagctggtcgctcccggtgcagacgctggtgttcatcacctcgttgacgtttattccggcaattttactgatgatgaccagtttcacccgcatcatcattgtttttggtttattgcgtaacgcgctgggaacaccctccgcgccacctaaccaggtattgctggggctggcactgtttttgaccttttttattatgtcanngnnnnnnnnnnnnatttatgtcgatgcgtaccagccattcagcgaagagaaaatatcaatgcaggaggcgctggaaaaaggggcgcagccgctgcgtgagtttatgctgcgtcagacccgtgaggcagatttagggttgtttgccagactggcgaataccggcccgttgcagggacctgaagccgtgccgatgcgcattttgctcccggcctacgtgaccagcgagttgaaaaccgcatttcagataggcttcacgattttcatcccttttttgattatcgacctggtgatagccagcgtgttgatggcattggggatgatgatggttccccccgccaccattgctctgccctttaaactgatgctgtttgtactggtggatggctggcaattgctggtcggttcgctggcgcagagcttttacagctagagaggcaaaatgacacctgaatcggtcatgatgatggggactgaagcgatgaaagtcgcgctggcactggctgccccgctattgttggtagcgttggtcacgggccttatcatcagtattttgcaggccgccacgcagattaacgaaatgacgctgtcgtttattccgaaaatcatcgccgtatttatcgccattattattgccggaccgtggatgctcaatctgttgctggattacgtccgcaccttgttcactaacctgccgtatatcatcgggtagccgtactatgttgcaggtgacaagcgaacaatggctatcctggttaagcctgtacttctggccgttactgcgcgtgctggcgctgatctccaccgcgccgattctgagcgaacgcagcgtaccgaaacgggtaaaactgggtctggcaatgatgatcacgttcgccattgccccatcattacctgccaacgatgttcctgttttttcgttctttgctctgtggctggccgtgcagcagatcctgatcggcattgcgcttggttttaccatgcaatttgcctttgccgctgtgcgaaccgctggcgaaattatcggtctgcaaatggggctgtcatttgcgacgtttgtcgatccggccagccatcttaatatgcccgttttagcgcgtatcatggatatgctggcgttactgctgttcctgacatttaacggtcatttatggttgatttcactgctggtcgatacctttcacaccctgccgattggtggcgaaccgttgaacagcaatgcgtttctggcactcaccaaagcagggagtttgattttccttaacgggctgatgctggcgttaccgctcattactctgctgctgacactgaatctggcattaggtttacttaatcgtatggccccgcaattatccatttttgttattggatttccattaactctgactgtcggcatctctttaatggcggcattaatgccgttaattgcgcctttttgcgaacatttattcagtgaaatttttaatttgctggctgatattattagtgaattgccattaatataattccgtaacgtttatcatgttatcccaaggattatccgaaaaataatacctacgaacatcttccaggatactcctgcagcgaaatatttgttttaagctcactcacatatcgcaacatttactttactttaagacaattccaggcaaattatacaacantttacgggatagtaagtccgcctgaaaaatcgcgagagtggcgcattaggtgacccatgttgttccgtttagtcatgatgaaatattcaggtaaggggaattatcgttacgcattgagtgagggtatgccatgtcaacgattattatggatttatgtagttacacccgactaggtttaaccgggtatctgttgagtagaggggttaaaaaaagagaaatcaacgacattgaaaccgttgatgaccttgccatagcttgtgattcacagcgcccttcagtggtgtttattaatgaggactgtttcatccacgatgcttctaacagtcagcgtatcaagctcatcattaatcaacatcccaatacgttatttatcgtttttatggcaattgccaatgttcattttgatgaatatctattggtcagaaaaaatttattgatcagttctaaatcgattaaaccggaatctctcgacgatatccttggcgatattctgaaaaaagagacaacgataacctcgtttttaaatatgccgacgttatcattgagccgaaccgaatcgagtatgttgcgaatgtggatggcaggtcagggaaccattcaaatctccgaccaaatgaatatcaaagccaagaccgtttcatcgcataaaggtaatattaaacgtaagatcaaaacgcataataaacaggttatctaccatgtcgtccgactgacggataatgtgactaatggtatttttgtcaacatgcgctaacacattctgactggtggtttcccaccagtcaggctgaattagattactctgctttctccacaaagataccgtcctgatgccctgcttcattaaagaaccagatgccgagcgggtagtcttccagcgaaaccaggtacattgtgccttcactaaactcctcaactgccagtaccacgccaggacgacgcggaccgccatccgttttgactgttacccgatcattcaccttcatcgttttcctcctgtggctttgtgccagtgtagaacaatttcgtttttctggcagcgccaggnnngcgcgagtgctgattttctcgacggtctatacttaagagatgccaggcggacttaacgactggcggcaacaacagagtaacggttgcgaggaaagatgatgaaaaccgcaaaagagtacagcgataccgcaaaacgtgaggtcagcgtcgatgtcgatgccctgctggcggcgatcaatgaaattagcgaaagcgaagttcatcgcagccagaacgattctgaacacgttagcgtcgatggacgtgaatatcatacatggcgtgaattggcggatgccttcgaactggatattcatgacttcagcgtctctgaagtgaatcgttgaatgcacaataaaaaaatcccgaccctgagggggtcgggatgaaacttgcttaagcaagaagcacttaaaaaattcgttacaccaggaaatctgatgtgttcatcaccttatccgcannnnttnnnnctgacaagaaaatattcgctatatgaatgattaacgctacttatgaatagaaatgtgacgcacgtcaccccttggtggctctggcgtcagcgggatcgctcccgaaaaaatcatctttgataatttgtgctgttttgagaatcatcctggtaaggggagtactgcgcgactatgttttcaattcaacaaccactactggtttttagcgatcttgatggcaccctgctggacagtcatagttatgactggcaaccggcagccccctggctcagccgtttacgcgaagcaaatgttcccgtcattctctgtagcagtaaaacatcagcggaaatgctgtacttgcaaaaaatgttggggctacaaggtttaccgctgattgcagagaatggcgcagtgatccagcttgctgaacaatggcaggagatagacggttttccacgcatcatctcaggtattagccatggcgaaatcagccaggttttaaatacgctacgcgagaaagaacattttaaattcacgacttttgatgatgtcgacgatgcaaccatcgccgaatggacgggattaagccgtagccaggcggcgctgacgcagcttcatgaggcgtcggtaacgctaatctggcgcgacagtgacgagcgtatggcacaatttaccgctcgtctgaacgaactgggcttacagtttatgcaaggtgcgcgcttctggcacgtcctggatgcctctgccggaaaagatcaggctgccaactggattatcgcgacctatcaacaattgtcaggcaaacgcccaaccacacttggcctgggcgatgggccaaacgatgcgcccttactggaggtaatggattacgcggtgattgtgaaagggctaaaccgtgaaggggtgcatctgcatgatgaggatccgacccgcgtctggcgaacgcagcgtgaaggaccggaaggatggcgtgaagggctggaccattttttctccgcccgttaagcgttatcgctcgcgaatacccgattgcgcccagcctgtttagcgagataaagccgacggtcggccagtgactggagttgttcaaaatcataatcaccggtttcctcgctgctacttacccccaacgaggcactgatgcgtatcgtcgtactcttagcaatcaacatctctttttcatttaacttcaggcgaatacgttctgcgacttccgcagcctccgtcagactcgcacctggcagaatcacacaaaactcctcaccaccgacccgcccggcaacgtcctgcgcacgcaaggaactgntaattaatccggcagcatgagaaagaacacggtcgcccgcctgatgaccaaagcggtcattaatcgctttaaaatggtcaagatcgacctgaatgacagaaaaaggatgttggtgcgtntgacacaatttcgcgagcggacgggctttttcgaacagtgcgccacggttatataaacgcgttaaggtgtngtgccacgcctgccactgcaacgagctttgcagaacatacatgttgctgaccatccggcgaatcacataccaggagatgagtaacatggtggtaaagagcgcccacagcagggttaatgcaatgctgatactgccgaaatcgccgcgcacgccttcgcttaacgtatggacgcgcaccagcacaccgtcgaaatggtccagacgttcccagctaacatagcgactgtccatacgaatgccgccccgcgtgtcatgttccattgcctgcgccagcaaggccagttcacgaggatcaaaaatattccctgttggatggtcaggattggaagaggtcaaaaatctcagcttactgtcatagagctgatactcaccatcgaggtttttatcgatggcgtttcttaaaaattgctgcatagtacgcacgggaatactcatccccagcacgccataccagtagttattactgtctaccggaacactgacggtaacctgcggttcagtattgctggcgtgttccggttgcgaagtgaaccagcgtaccgcgcggtgacgattttctcgttgtgaatggccgataaaccagggttgggtgacatagccgtaataacgcgtcgggacattgcgcgtaaacaaggtcggctgcgtcgaaacgtaaaatccggcacgcgagacatacatcgcctgttctaccatcgacgaggagttgtgtgccagtcgcagcaagtaaccaacttccagtgcagcggtaatttcattgtcgaggctttcattttcgcgagacaggagattcccctcgctgactaatgcatccgatacgccattgactgacagggtgcgtcgtcggttgagttcgatttgccaggcgtgctcgtcgcgatgctgttcgaactcggttacagcatcacgcagagaggtgaaatccagtggcgctacgagagcttcgcgcatgccattacgcaaaaagatcagtttgtcgacgttatactgcaaatgcttatcgagcgcgttggctacgttttccagatgattacgctggctggagatataggcatcttccagcaccactacttcacgccaggtcagcaaggtggaaaaaagcaataccacgataaagcagagattaacgatatgaccaggccctaggcggcgtgcgagttttttcaaccagctctggttttccatttttgtctcgtgctgcaccctgacgactccccacctgcttttttatgattctggcataacctggcgatagcgtaccgcaaaacagcgataattttataatggtggcatgatnnnnnnncgactatcattcattgcaggcattggcacaccaggccggatgtgatccggcctggtcttaatgataccctttcaaacttcttccgcagaacgactcccctcccctggaacaagctcggtttcatgaaaagcttcccgcttgaccccgtaaccgtcataccaacgacactcaaccataccgctggagtatccagtgacaatcatccgcgggccgccctctttaaccgtaacttcctcactaaccataaagctcatactcgcctccttttttcgagtgaaacttgttcaccttagttgaagatggcgaattttgcataatagcctgtgcgagtattaatgtacctgaccgcgcattttcgctacggctttcactcccagcaccacgatgccgccgatgataaatccaagaatcagatttaaaacagtcggtaatatcatcgccaccactgcactttgctgcccggcgaaatgttcaatggcgtgatgcagcggcgcaataccatgtaccacaatcccgccgccgacgaggaacatcgccagcgtgccgacaatcgataacgctttcatcagccagggcgcgataatcaataatcctttacctaatgcctgcatcagcgcgctggatttttccgccagccaataccccaggtcatcaatcttaacgataacccctancagaccgtanacgcccacggtcactaccagcgcgatgcctgaaagcnccagcacctgattaagcaacggcgcttcggccacaatccccagcgtgatggcgacgatttccgcagacaatataaaatcggtacgaatcgccccttttattttgtccttttcaaacttcagcggatcctgcgccgccagcttctccagacgctgctggctctgcgccggatcttctttatgtttacgcgnctccagcatatgcagcactttctctaccccttcaaagcagagaaacgcgccaccgatcatcaacaatggcgtaatcgcccacgggataaacgcactgatgatcagcgccagtggcaccagaatcactttattaatcagcgatcctttcgccacgccccagaccacgggaagttcccggttggcccgcacgcctgaaacttgttgcgcattgagcgataagtcatcccctaatacaccggcggttttcttcgccgccagtttgcccatcacggagatatcgtccagcagtgtggcgatatcatcgagcaacgtcagtaaactactcccggccaaaagcattccctctcatttttattgttgaagggtgtaagtatgaagcaaaaacggcagctctgatacttgcttcacaggtcaacatttttttaacaatcaagtgcaattatatctctcgccagcagaatgattttcacgtttactatgaaccacctttttatttccaccgtgagggattatgcgtttccgccagttgttaccgctttttggcgcgctgtttgcgttgtatatcatttggggctcaacctattttgtcattcggattggcgtggaaagctggcctccgttaatgatggcgggtgttcgattcctggcagccggtattttattgctggcatttttactactgcgcggacacaaactccccccgctacgtccgctgctcaatgccgcgctgattggcctgttattgctggctgtcggtaatggcatggtgacggttgccgaacatcaaaatgttccttccggcatcgccgccgtannnnttgcaaccgtgcccctctttaccctgtgcttcagccgcctgtttggcattaaaacgcgcaaactggaatgggtgggtattgccattgggcttgccggaatcatcatgctcaatagcggtggaaatttaagcggcaatccgtggggcgcgattctgattttaatcggctcgattagctgggcgtttggctcagtttatggctcgcgcattaccttacctgtagggatgatggcgggtgcgattgagatgctggcggcaggcgtggtgttaatgatcgcgtcgatgattgcgggtgaaaaactgacggcgctcccttccctttcaggcttccttgcggtcggctatctggcgctgtttggttcgattatcgccatcaacgcttatatgtatttaatccgtaatgtcagtccggctctcgccaccagctacgcttacgttaacccggtggtcgcggtcttgctgggtacgggactgggtgganaaacactgtcgaagattgaatggctggcgctcggcgtaattgtcttcgcggtggtactggtcacgttgggaaaatatctctttccggcaaaacccgtagttgctccagttattcaggacgcatcaagcgagtaaatgtatcccctgcgtgtcgatctgcgcgctggctccttcgccgcagatccactcttccagacgctcggtaagcgcttcatccttcagcttctcgcgcccacgtaacgcgcactcccagacaatcaatacgcgccagccgagttcctgcaagcgactgatatcgcggcgatcgcgctcaacatttttacctatcttctccagccagaactcggttcgagtcgcaggcactttaaacagatagcagtgatgatgatgccagaagcagccatgggtaaatatcacgcagcgatattcatcaacgacaaaatccgggcgtccgggcagactggcgtcctgaacgcgaaacgccaggccctgcccggttaacagactggcgaggcgcttctcaatcgccgtatcacgcgtggcaatcgcgcgcatatttttgctgcgagtggccttatcgtgaacgtcggccatgttgtgcctcttgctgacgcaacgccaccgcctgtttgatttttggctcaagcagttttgccaccgcggcaaagaccggcacgaccaccgagttaccgaactggcgataggcctgagtgtccgaaaccggaatgcggaatttcgcttctcccggcgcttcaaaacccattannnncgcgcattcccgaggcgttaaccgacgtggacgatgttgctgattcagcggatcgtcaaagtctttctcacccgtggccatatcccagccgcgatcgattaaaatttccgcgccatctttgtaataacgcgcagacagcgtacgggtgacgctttgcggattgttcggataaaccattccataaccgaagccgtttccgcgcgcctgatgttttttcgcatatcgatagaggtacttccacagcaccggcgtcaggatatatttcgcctcgaccatcgggtccaacagctgcgccagcgtcactcgctgtgcagggaaacattcgctgatatcacgcagagtaaaatcggctttcagattaagatcgcgacgaaaacccaccagcacgatgcgttcacggtgctgcggcagaaaatgtttgccatcgatgattttcggatcgtccggcccgttatcttctgcatcagccacgtcatagcccagttcgtccagcgtctgcatgatgatgcggaacgttttaccctggtcgtggcttttcaggtttttgacgttttcgagcacaaacatcgccggacgacgcgcgtcgataatgcgcaccacatcaaagaacagcgtgccctgagtatcgcaggcaaaaccgtgcgcccgcccgagcgagttctttttcgatacgccagccagcgaaaatggctgacaagggaaaccggccagtaaaacatcgtgttcaggaatgtgttgacgaatatgttccgccgcagcctcatcactcacgccttctttatggctgagggtgatgtcgcggatatcttcattaaaatgatgcgtcgccgggtcgcaataatgattggctttataagtgcgtaccgcatgtttgttccattcgctggtaaacacgcactgtccgccaatcgattcaaaaccgcgacggatgccgccaactccggcaaatagatcgataaagcgaaacgcataatgcggatgatgtgccggtggtttgggtaacaacgtttgcagatgggcgaactctttctcacttaaacggtgccatgccgagtcattcgccagcgcacgttttaaaattgccgcgctccagtgattctcacccacaccattaagctgagccaccagcgttttaacatcataaatttgcagcagtttctccagcattgcctgtgcggcattcccggtgctgtatgaatcggttactgatatattttcctgcatagatttaaccggccatctgagatggtcgacaggttaacataattacagccatttagggccacgcgctcagcccgcgggtgaaaacgcatctatcaccttgtgatcgacaccttcattctcccccgccagttcggcactgagcttcgccataaactcgactaaaaaatgcgcgttgtgctgcgccagctgcttgcctcttacggtttgcatgatttgcggtagcttcaacaacttagtctggaaatgatccagcgcgtagcgtttatcatcaagcgggcgatgctgtgcgagcggatcttcggcatcaaacagcgccacgcccaatgcccctgaaacggcaaacacgcgcgccaggccaatcgcccccagggcttccagccgatccgcatcctggacgattttagcttccgttgttaagggggcgatttgcgcgctgaaactgtgagcggcaatggcatgacaaacggcctcgattttctccgccggaaattgcacgaactcttcacggagcaggcgacgcgtctcttctgccgccaggattgaagaacgctgccgttgcggatgatttttcgccaggctcacaatatcgtggaaataacaggcggttaaaatcaccagcatatcgacgtcatcatctgccgccagcttctgtgccgtagcccagacgcggcgaaaatgacacacgtcatgggccgcgtcctggtgctgatgatggtttttcaaccagttttcgaactgtgcctgccagtgttgtaagtccatacgcgctccgttgccaaagagtcgccaccttagcagtttttattcatagcgtctgctacgtgcgggacgaggtcgtgtgtaccaggcaatgctgcctaacaatgccccgaccagagccataaataaaaatccgaccagtgccctaaccactttcccgcggtagagcctaaatcgctttcaaatcccgacacgggggcatcggggatccggctcatcacccagatgtaacgcgccattgcccagacgaaatagccacaccatgtataaaaagcccacaaagccagtttgccgccagggctgcgagagagtctctcttccatctttgtcgaaccgtattccattttgagataacccggaaaattcagacttagtactattatgtgataaaagtcacatttttccacattggatgagccagtcaagactcactcattttttgaacaaatagataatttttgcgcaacggcagtgaatacaggaaaaatcgttttgagcgattttatttatctttgagatcggctttattaattcattcaatcaatatattagcactgattacaattatacctttttattattctgtgtcatgatgcttccgttattagccttttatcgtcttgtttatattttttgggccggcatgatgccggcttttttttnnnnnntcattnntgtgcgcgtgatcacaccagccgtttagcgcaacaatcattgataccccccatctttccgatcaactcataacatattgatatacatttataattttnnnnaatatttatatttagaattcatannnnnnnnnnnnnnnnnnnnnnnnnnnnnnnntttgaaatcttttaaanntnnttgttncannnnnnnnnnnnnnnaaaatgaacttcatagaatagtatccaaatgtgcttttttttggataacggcacttattgatatattcatgaagattataatcacaagggaatacataatgaaaagaaaagttctggcaatgctggccccggcgttattagttgctggcgcagcaaatgcggctgaaatttataataaagatggcaataaactggatttgtacggaaaagtagcgggcctgcactacttctctgatgatgctagcagcgatggcgacatgtcatatgcccgtatcggtttcaaaggtgaaactcagatcgctgaccaattcactggttatggtcagtgggaatttaacattggcgcaaacggtcctgaaagcgacaagggtaataccgcaacgcgtctggcatttgctggtttcggctttggtcagaatggtactttcgactatggtcgtaactacggtgtcgtatatgacgtagaagcatggaccgatatgctgccagaatttggtggagatacctatgctggcgctgacaacttcatgaacggtcgtgctaacagcgtagcaacctatcgtaacaatggtttctttggtcaagttgatggtctgaactttgcactccagtatcagggtaacaacgagaaaagcggattatttgatcaagaaggttcaggtaacggtaatggacgtaaacttgctaaagagaacggcgacggnnnngtatgtccacttcctatgactttgactttggtttaagtctgggcgctgcttactctaactctgaccgtaccgacaatcaggttcacaaaggtactcataacactcgttatggagatcgcttcgatgcaactgctggcggtgaaacagcagaagcatggaccgttggtgctaaatacgacgctaataacgtttacttagcagctatgtatgctgaaacccgtaacatgactggttacggtgatgctgatgccatcgctaacaaaacccaaaactttgaagttgttgctcagtatcagttcgacttcggtctgcgcccgtccatcgctnatctgcaatctaaaggtaaggatttaggcggtgtaaatagtgataacttcgacagccagggtaatcatcattacaccaacaaagatctggttaaatatgttgatattggtatgacctactacttcaacaaaaacatgtccacttatgttgattacaaaatcaacctgctggacaacgacgacgacttctacaaagaaaacggcatcgctaccgatgatatcgtggctgtgggcttagtctaccagttctaatcagccaacgcgccgcggcgtgttattgtaaaactgaacactagcctgagttcgtccctcatcgaactcaggcttttttattggcatttcatctccatctgcggcacacgcaattgccaaagcttatcgatacacccccttaccctgcccctcctggcacaataacatcaaccagcgactcttcaagccaacacccaaatgcatttctttatgaattaatccgtaacaaacacgcttcccatatagaaatatttgcaaaaatagtgcatgaaataagctttttctctaccaatccgcgatataaatattcatcagcaccacaatattccacagcactaaatctctccccgccnccccgtacctctgataatggtctaaaatcattgaggccacttgcgacgaagttgctcaataaggaaaatttggcgtgaataatattcaacaccagtgcagcatcatcattacatacttacacccgccgactaccgctttcgatatattgactcaattttccagcctggttaaaaatagngaccagctcagtcgcaaatatagtgactaccctaactaagcaacaataaggaatacactatgactgttcaaaccagtaaaaatccgcaggtcgatattgctgaagataatgcattcttcccttcagaatattcgcttagccaatataccagtcctgtctctgatcttgatggcgtggactatccaaaaccttatcgcggtaaacataaaattctggtgatcgccgcggacgaacgttatttgccgaccgataacggaaaactgttctcgaccggtaaccatccgattgaaacgttgctgccgttgtatcatctccatgctgcaggtttcgaattcgaagtggcgaccatttccggtctgatgaccaagtttgaatactgggctatgccgcagaaagatgaaaaagtaatgccattctttgagcagcataaatcgttgttccgcaatccgaagaaactcgcggatgttgtcgccagcctcaacgctgatagcgaatatgcagcaatctttgttcctggtggtcatggcgcacttattggtttacctgaaagccaggacgtagctgccgctttacagtgggcaatcaaaaatgaccgttttgttatctccctttgccacggcccggcggcttttctggcgcttcgccacggcgataatccactgaatggttattccatttgcgcattcccagacgccgcagacaaacaaacgccagagattggctatatgccgggtcatctcacctggtacttcggcgaagaactgaagaaaatgggcatgaacatcattaatgacgacatcaccgggcgagtacataaggaccgtaaacttctcaccggcgacagtccttttgcagcgaatgcgttgggtaaactggcggcgcangaaatgctggcagcttacgcgggttaatccctgttacgtttgaatgtaagcgcataatcaatcgcagccgcgttagtactcacgacgtggctgcgttttttcacggttaatttatggcgtactgaagccctatgttaatttctttgcggcaacgtaatccggaacacattatgcttattgagatagtgatacgtagcacttcccccatgcaattcggcaatcgctttgactaaagaaagaccaagtccctgacctacggaatgacgcgaattatctccccgccaaaatctacggaagagtttttcaggctcattaattttcgttccagggctggcgatatcaatattaagatagctgttggtatcaagaaaactggttatatgaatacgcgatttttctggcgaatatcgaatagcgttaacaataagattcgataacattcgttgcagtaaaatnnnnnccgcaaagatttgctgattgcactcgaccttaaagcaaatctctttctcgtctgaaagatattcaagatagtccaacaaattttcgacttccttattgagagaaagcgagtccagtttcaccaaaacattgtttttatctgccctggcaagaaacagtatgttctctgttaaccgcgaaatattttccagctcttcaatgttaccggcaattgttttttgatattcagcgatacttctggtttgactgagcgtaacctgattctgacccagtaatgcattaattggcgttctaagttcatgagcgagatcgtcagcaaactgacttagacgctcaaaatctttgactaaagcatgatgcattttattcaacgcctgcccaagaggttttagttctctcggtaatgcgctaacctcaacaggctcccggctatcgttataattcagcgcttccgttacaccactcaactttttgatctctcgtaaccccgttcggattaacagcggacttaatactgagcacagtataatggcgacaatgcaaattataatgctattgattttatactgttcaagcatgttatgtctggctgaagccaatttagccacagtaaccgttaatgatggcgaaacttcatcaatattaattcgtaaagcatctatctctgtatcattaataatgcttctgtaaatgccagctgcgctgattgtctcactagcaggtatgttatttaacatgtcatcactgacatttgtccggttaacaattttattgatgccatcaccatgaatgatcaagatatcctgactaacatccatcatccggttaaagtatacaggtaacgtatctggatttaccccatcaattaataactgcttgatctgcgctgtccggttaatgagtgttgtatcatcgcgccatttcaactcacttgcgaggccattatagagagtccagacaattccggcgccagcaacagacagcagcaatataaaaagcaaggttaaacngacggttatagataatcttttcattatttttttaccgctacgaacgaatatcccatcccacggattgtggcaattagcttttcaggaaaaggatcatcaacttttgcgcggagcctgcgaatggcgacatccaccgtattggtatcactatcaaagttgattccccaaatttcactcgcaataaccgttctgggtataatttcgccagctctggaggccagtagccaaagtaactgaaactccttgcgcgtcagtgtaatactgatattgtccctgctcacactttgactaacagagtccattcttaagccgctgatttctaatgttgaattcaaagcgtgatgttgccttaattgtgcccgaacccttgccagcaactcagaaaatgaaaaaggttttaccagataatcatttgctccactgtccagccctctgactctgtcatcgacagaatcccttgcagtaaggcaaataacaggggtttgctttgccgttcttaacgtttgtaagatctgccagccatccatacccggaagcataatatccagaatgatcaatgcataatcatccttcagcgcaagataaagcccatctctgccatcagaaacggcatcaatgacataacccgcttcggaaagcccctgcgttacccactcctgggtcctttgattatcttcaataagtaaaatcttcatgaaaataatatgccataaatcatatgtcatagaaacagcctggttcattacaaaattgtaatgctgctgtaaggttaccctggacgctttttcgctatcctcaaaactcattcacatgacaagggatataaacatgttaaagcgttatttagtactctccgtagtaacggctgcattttcattaccttctttggtctatgctgcacaacaaaacattcttagcgtgcacattttgaaccagcaaacaggaaaacccgctgccgacgtgacagtcactcttgaaaagaaagcggacaacggctggttacaacttaataccgccaaaacagataaggatggacgaattaaggcactgtggcccgagcaaactgcaactacgggcgattaccgtgtcgtatttaaaaccggggactatttcaagaaacaaaatcttgaaagtttcttccctgagatccccgttgaatttcatattaataaagtgaacgagcattatcatgtgcctttattacttagccaatatgggtattcaacctatcgtggcagttaatgcataaatatgtaaaagcagatctctgctactgttagggaggacactccctgacagattaacagtaaacggctcttgctggctaacgacaaaaagtgtgatggcttatgaaaaagaatcaatttttaaaagaatcagatgttacggccgagtcggtattctttatgaagcgtcggcaggtgttaaaagcactgggcatcagcgcagctgcactttctttgcctcacgctgcgcatgccgatctgcttagctggtttaaagggaacgatcgcccacccgcccccgccggaaaagcgctggagttcagcaagcctgccgcctggcaaaataacctgccactgacgccagcagataaagtctccggttataacaacttctatgaattcnggctggataaagccgatcccgccgctaatgctggtagcctgaaaaccgatccatggacactgaaaatcagcggcgaagtggcaaaaccattgaccctcgatcacgatgatttaacccgtcgcttcccgctggaagagcgtatttatcgtatgcgctgcgtggaagcgtggtcgatggtggtgccgtggattggttttccgctgcacaaattgctggcgcttgccgaacccaccagcaatgcgaagtatgtcgctttcgaaacaatttatgcaccggaacagatgccaggccagcaggaccgctttatcggcggcgggctgaaatatccttatgtcgaaggattgcgtctcgacgaagcaatgcatccgctcacactgatgaccgtaggtgtttatggcaaggcgttaccgccacaaaatggcgcgccggtgcgactgattgtgccgtggaaatatggctttaaagggattaaatcgatcgtcagtattaagctgacccgcgagcgtccgccaaccacctggaatctggcagcgcctgacgaatacggtttttacgccaacgttaatccgcatgttgatcacccacgctggtcacaggctaccgaacgatttattggttcaggcggcatcctcgatgtacagcgccagccaacgctactgtttaatggttacgccgaccaggtggcatcgctgtatcgtggcctggatttgcgggagaatttctgaatgcgtctgacagcaaaacaggtgacatggctgaaagtttgcctgcatcttgccggattgttgccgtttctctggctggtctgggcgatcaatcacggtggactgggtgccgatccggtgaaagatattcagcattttaccggtcgcactgcactgaaatttttgctggcgaccttgttaatcacacctctggcacgctacgcaaaacagccgttattgatacgcacacgccgcctgttaggcttatggtgctttgcctgggcgacactgcatttaaccagttacgcattgctggagctgggcgtgaataatctggcgttattaggcaaggagttaattacccggccttatttaacgttaggaattatcagctggattattttgcttgctttagcgtttacttcaacccaggcgatgcagcgaaaactcggcaagcactggcaacagttgcataatttcgtctatcttgtcgcgatcctggccccaatacattatctgtggtcagtgaagattatttcaccgcagccgctcatctacgctgggctggctgtactgcttttagccttacggtataagaagtcgcgttccctttttaaccggttacgcaagcaggttcacaacaaattatctgtataacttcatattgccgacaaagtacgcgttatccctgccggatgtggcgngagcgccctatccggcctacgcagatcacatcaggttatgtttcgtttgtcatcaacctcaaattatcaacataattcattttatttcaataagatagataagtacacctgagaaaactatgctctcatctcctaagagttgttgcattttgtcatatgttacaatataacattacacatcatatacaatgactctggaggaaactgttttggcgattcgtcttcacaaactggctgttgctttaggtgtctttattgttagcgctcctgccttttcgcatggtcatcactcacacggcaaacccttaacagaggtcgaacaaaaagctgctaatggtgtttttgatgatgccaatgtacaaaaccgaacgctcagtgactgggatggagtctggcaatccgtttatcctttactgcaaagtggcaaacttgcccccgtctttcagaagaaagcggatgcagataaaactaaaacatttgctgaaattaaagattattatcacaaaggctatgcaacagatatcgagatgattggcattgaggacggcattgttgaattccatagaaataatgaaacaacatcctgtaaatatgattacgatggatacaaaatactcacctataaatcaggcaagaaaggcgttcgttacttattcgaatgtaaagatcctgaaagcaaagcccctaaatatatacaatttagcgatcatataattgcaccacgaaaatcatctcattttcacatttttatgggtaatgattcacagcaatctttattaaatgaaatggaaaactggccaacgtattatccatatcagttgagtagcgaagaagtggtcgaggaaatgatgtctcattgagtattctcatgataacgcctcgatgccgctttagtatgtcatcataactgccactggtccatccacaaacgccactgaacgcaagctagctacagacacgctcatcactatgacgtgtctgtatattaataagctaacccgcattgagttaaccaataacggattccatacacaatacggccaacagagaaagatacctgtgctcacgccattgcttatattggctggttacaatgtgcactatcaattttttaaataacaaattcttaaaaccacatctgtataaggaatttttaaggttcgtgggatagcttgactgtgaaaattacaggagctacaaaaatgaaccgattctcaaaaactcaaatttatttacattggataacgctgcttttcgttgcaataacctatgccgcgatggaactccgtggctggtttcctaaaggtagtagtacttatctgctgatgcgagaaacacattacaatgcgggtatattcgtttgggtgttaatgttttcacgcctgattataaaacaccgttatagtgatccttctattgtgccaccgccacctgcctggcaaatgaaagctgcttcgctaatgcacatcatgctttatataaccttccttgcgcttcctctgctggggattgctttgatggcttacagtggaaaatcgtggagtttccttggtttcaatgtgtctccctttgttaccccaaacagcgaaattaaagcactgataaaaaatattcacgaaacctgggcaaatataggctactttttaatcgcagctcacgctggcgcagcactctttcatcactacattcagaaagataatactctgttacgaatgatgcctcgccgcaaataagtcgatcctctgacaaaggaaatgtgaaccatggacatcaacgcatcataaatgtttacgcaagtgcataccgcactctttccactatcaacaaggaggagcagaaaatgtgtaaatcgtacaatggtaagacttatcaaaaatacaggttaattttggtatttaaaccttttttacttgttagtatgatacaaaggctttcaaaaaagctgggaaattcaacaactcttggaaattatggactttgtcccgcggctttaatctgacggccgcgttccttttttgactcaattcttgaccccttctctacgcaacttcagttcccaccaccaactttgcggcagtttcataggatgaatgtctaaaagaataatggtgagcgataagaaaacgactgaataactgcacattttcgctcgaaagcttcctgtcagatccatagcgaatcaagtgctgaatgtcacagtatcgaacagaaaacagtgacgatctaacccttcaagaatatttctacgattgttctgtttaggaaaagcaaggcgggaagtcgggagataagtcattgataaagtggcggagagagggggatttgaacccccggtagagttgcccctactccggttttcgagacctatgctatgggttaataaaatcaatatattatgtgttttatttggaataaanattctatatttaggattgaaaaatcagatggttagcatcaaacaacctcagaatattccaagcaaacaggttaaaaataaaactgcacccgaacaattgataacgacagaaaacgccttttccgagccaccaaaattacttcgcatcctatttattgctcacgttaacgccttgtataactcgagctctccacggtatttaacctctcttctgtttaactataattccaataaatctcgtcactgagctcaatcacttcgaaagtcaagcacaatatgaatttcacataagctatcaatgaaaatcggaggtcataccattaatcaacaataaaccaagtctttctcatataatcacttgacaaacactcatgataattgtaataaaatatataaggctataatacaatactgtcaatcaatatttcatttatatgagaaaaaggcatttannatgtcaattataaaaaactgcttatcattaattaacaatgcattaaatatacaaaaaacatcatattctctgaccaaaatggagcaggcagggaagttgttaaatagaaaaataactccagaaaatactcctccaatgttgttatcatacagaaatgcagatttaacgcaagaaaaaaacattacagaaagagttttatccatatttaaaataaaacgagattttgttgctgtaagaatccaaaacaatcagtttactnnnnnnnnnnnnnaaaaaattcaaggccatcaaaacacagttgccagtgtcatggattggtataatccccaaaaaaatgctttgggtataactatgggtacaccaagaaaatcggccgatatagcaaaagaagagcacagaaatgcactaaatttcatgataatggaaaaaaacacatttcatgaaaaaatcttaaacagcaatgacaatttgcaaaaatcatacagcaaaacagaagacagtagttgggtcgcagcttctgtcggctctcttctagataaaggagcaaaagtatatcccgatacatcatgctctctgagactgggagaaccattcatctttacgctgccagaatcagttagagtcgatgttgacatatatcctctcaaaaaataatcttaaaggtattgacatataagaaataattaagtgtattcacattagactagtcgcttaagagtagatttttggcattttgggaagatcagcgggacataagagacatacaacacaggaggaatggctnttttttaatagtgctttgaattccgcataaaacctttcttagcagtcgaaaagcaaaacatacgttttctttttaacaataattgatgagtattgcatcgagtgtcatttatacatcgccgcntttatttgccactataaaaaggctgattacatatctatcggagaactaaaattacttataaggtaatctgcatgattaacaatgtttcttcactttttccaaccgtcaaccgcaatattacnncnntatataaaaaaagcagcttctctgtatcaccacagaaaatcacattaaatcctgtaaaaatcagctcacctttttcaccaagcagtagctccatcagcgcaacaactctctttcgagccccaaacgcccattcggcatcatttcatcgacagtctactgctgaaagttcgttacatcaacaacttcctaatgtgaggcagcgcctgatacaacatcttgcagagcatggcattnaacctgcccggagtatggctgaacatattcctccggcacnnnnnngnnctgcgccaccaccgccagtacaaaatgaacaatcaagacctctgcctgatgtggctcagcgtctggtgcagcatcnngcagannnngnnnnnnnnnnnnnnnnnnnnnnnnnnnnnnnnnnnnnnnnnnnnnnnnnnnnnnntattcnnccgnnaccnnactnnnnnnnnnnnnnnnnnnnnnnnnnnnnnnnnnnnnnnnnnnnnnnnnnnnnnnnnnntggcanncaaccagcccggnnnnnnnnnnnnnnnnnnnnnnnnnnnnnnnnnnnnnnnnnnnnnnnnnnnnnnnnnnnnacatanncctccggcacctaactggcctgcgccaccacngccagtacaaaatgaacaatcangnnctctgcctgnngtgnntcanngtcnnnnnnngcatcttgcanngcanngcattnnnnnnnnnnnnnnnnnnnnnnnnnnnnnnnnnnnnnnnnnnnnnnnnncnnccggcacctaactggcctgcgnnnnnnnnnnnnnnnnnnnnnnnnnnnnnnnnnnnnnnnnnnnnnnnnnnnngnntggcattcaaccagcccggaatatggctgaacatattcctccggcacctaacnnnnnnnnnnnnnnnnnnnnnnnnnnnnnnnnnnnnnnnnnnnncnnnnngaannatcaagacctctgcctgatgtggctcagcgtctggtgcagcatcttgcagagcatggcattaatacatctaagcgctcgtgattataatataattacctatattagctctgacctgacagttaccgtttatttatacaggtatctgtcagattacatctaaccaacaaaaaaccggagnnnnnnnnnnnnnnnnnnnnnnnnnnnnnnnnnnnnnnnnnnnnnnacttcatcccgccaatattttcccacgtcccgtcagcacgcaggatttgcagcggtcttaccacacactgtatctgctntttatccgcatccagtatcaccacctgcgtgattaccctggcctgctccggnataatnccattctcatctgactccaggatgtctgccggccccagacgcagttgtnctgtaagtaactncccgtgttcacngtcatcatgctttccgtncccncacagacgctgcataantttttttantatgttcatgtcattctcctgttctgcctgtatcactgcccacttcatcnagccccttgacatcctgccacggcccgtcaccaaacctgacctgcaaatgctgaaaaaanccctgaacctgtgtggcatctttgggntcaagaaaggtcagtccggtgatgagcgcaccatctgtacccgggaaccagccattgctgtttgtctcaataatgctcgccggccccagacgaaaacggatttgtgtctcccccgggtcgcccttcggtccctgaggtnnnnnnnnnnnnnnnnnnnnnnnnnnnnnnnnnnnnnnaccgggccagccgcacctgtttctcctttcggtccctgtgggcctgccgggcctgcngcnnngnnnnntccctttggaccctgtggacctgcatttcccgtcagaccggtctcnnnnnnnnnnnnnnnnnnnnnnnnnnnnnnnnnnnnnnnnngcgggcctgccggaccagcatcacctgccggtccccgttcgccggttgccccgacagggccggtgtcaccgcgctctcccttatcacccttcggcccctgaggnnnnnnnngnnnnnnnnccccctttggcccgggnggtcccaccacggtggggattcggtttacggcctcttccgccgctatcctgctttgttccgctgactgtgcgctttctgctgactcccgggctttttctgttgcggtcgttgcatccctggctgcattaccggctgcactttctgccgtctttnttgacaantcagcatctgctgcactttgtgatgactcactggctttnngnnnnnncnnagaanccgaggacgaggacgcatcctctgactgctttgctgaggctgcactttctgccgcctgccgggctgactccgatgcctcccctgctgaagtgtcagcatttgcagcgctctcttctgcctgactggctgatatgccggcattcctcgctgacgtctccgcctctccggcattcttcttcgcctcctcagcgtgacgcnnnnnnncttccaccatcagttcaaaacggcgcagngcnnnnnnnnnnnnnnnnnnnnnnnnnnnnnnnnnnnnnnnnnnnnnnnnnnnnncatggcaccgagaaaatcattcagcgtaccgggttgagaatcttcatacacggtgatggtcccggcatgtgacggcgggaatccttccaccaacagaatgacgctgtactgaccgtactcaacgtccatgctgtaacgaccggcttcatccggattttcagaggccaccgtgttcaccaccaccgnnnnnntggnccgtctggctttcagttgaatggtncagttctctaccggttttcctgtgccgtctttcagtacacctgaaatctttactgccatattcaccccnnnnnnnnnnnnnnnnnnnnnnnnnnnnnnnnnnnnnnnnnnctgtcatancactgtgttacctggctaatcagaacttataaccgacacccacgatgaaaccgtcagtgcgcnnnncgccactgccggagccttcataagcaatatcaatggccackgattcggtcgggttaaactgcacgccagcnccccacgccagagacgtgttgctgtggcgancgtcatcacttccggtcagcacntcgtgcgttttccncttgttgtcagttacgcgragataatccccggagaaagtcgacacacggctgtaagccnnncccgccatcgcatacgcgctgannnnnnnnnnnnnnnnnnnnnnnnnnnnnnnnnnnnnnnnntcacgcgcacagacggccccgccattacgctgaaccagcggttacgcacggaatcttcatgccagcggatatcgctgtaacgggtmagctggcgattcttgtctcctgcatagctgaatgacgtcaccagccccagcgtgtccgtaaactcanaacggtatttcacgttaatcccgttnagatnatcgctaccgggagcgttcgtccgggcatgaagataccccgcgctcagcgtggnctgntgntcagnnnnnnnnnnnnnnnnnncggatacggncagacagatggcnncggacaanatggcggcataaagtttacgcataattacctctcgcttttctgcaataaaaaannnnnnnnnnnnnnnnnnnnnnnnnnnnnnnnnnnnnnnnnnnnnnnnntgggttataaaattcagctgatactgatncctgctgtggattttttcatcaccacaaccagcagatcgctgatactggttgttggtgtccagttattcgctcctgatgaagatacggtgaatgtcagtgtcagcgtcccctgtccggcaggcatatctataactgaggaaaatacgccctgagcatccgtcgtggactgattaaaaatctcctgaccattgcgggtcactcttaaccggcaggttgaataccagtatgactgttggttattactgttgaaattctcatgcttaccaccgmggaataacactggcggtatcatgannnnccggtcaaacttctgatcatcactgattcttaccgtgatggtgccactggcatnnnnnnnnnnnnnnnnnnnnnnnnnnnnnnnnnnnnnngacttgctgaccgttttgacaatatcgccttcaatctggttggctgacagtttccccttaatctgacagttntcattaatcgtgacgttgttgagcgtncctgagttcgcannnncactgccactnntatccgcattttnnnncgtcanncnnnnnnnnnnnnnnnnnnnnnnnnnnnnnnnnnnnnnnnnnnnnnnntnnggggattgccggacgaggtgatactcaccgcaaacagncgcttcaggaacacgtcgttcatgaatnnnnnnnnnnnnnnnnnnnnnnnnnnnnnnnnnnnnnnnnnnnnnnnnnnnnnnnnnnnnnnnnnnnnnnnnnnnnnnnnnnnnnnnnnnnnnnnnnnnnnnnnnnnnnnnnnnnnnnnnnnnnnnnnnnnnnnnnnnnnnnnnnnnnnnnnnnnnncgtctttcgttttttgaaccttcagcatgtanngcgcagccaggtcatcatttgtnnncnnnnnnnnnnnnnnnnnnnnnnnnnnnnnnnnnnnnnnnnnnnnnnnnnnnnnnntgaccgtctgtgtgatttcattgcgggtttcggtgannnnnnnnnnnnnnnnnnnnnnnnnnnnnnnnnnnnnnnnnnnnnnnnnnnnnnnnnnnnnnnnnnnnnnnnnnnnnnnnnnntgcagttttcnnattttttcccggaaaaattccagatacccttcaccatcattgctgggctgcccgctgatttccacaaacgcnnnnnnnnnnnnnnnnnnnnnnnnnnnnnnnnnnnnnnnnnnnnnnnnnnnnnnnnnnnnnnnnnnnnnnnnnnnnnnnnnnnnnnnntggccataactgttaattgccctgactgtcagggtgtattccccgagcggcagaccactgaaacgatgctctgtatccgcagtgatggcggtggtcaccagacggctgtcctgaccgcttccactggtcaggcgcagactgaagcgcacgcccttcaccacccgcggcgtgtcccatttcgcctgcgccagatactggctgtcagctgcactcacctccaccgtcaggtgctgcactgccggtgggataacgctgttcannnnnncgctctggtcgccgtcaaannnnnnnnnnnnnnnnncgatggcttctttntccgnnacntgctgcactgccgtgatggcaaaggtaccgtccgtgttttcccggatggaaacacagcggaacaggcgacgacgcagtgacgnnnnnnnnnnnnnnnnnnnnnnnnnnnnnnnnnnnnnnnnnccggtnnggcgcggggtgtgcnnnnnnnnnnnnnnnnnnnnnnnnnnnnnnnnnnnnnnnnnnnnnnnnnnnnnnnnnnnnnnnnnnnnnnnnnnnnnnnnnnnnnnnnnnnnnnnnnnnnggtcacctcacggtccagtgtcagggtgcggctggcggcannnnnnnnnnnnnnncgtcnnccggtcatggtcccggcatagtcgttatcacagatttcaataatgtcaccgggtgtgtgacgcagccnnnnnnnnccgagcgtgaaatccaccgtctnnnnnnnnnnnnnnnnnnnnnnnnnnnnnnnnnnnnnnnnnnnnnnnnnnnnnnnnnnnnnnnnnnnnnnnnnnnnnnnnnnnnnnnnnnnnnnnnnnnnnnnnntggtacagccaaaggcatccatctnnnnnnnnnnnnnnnnnnnnnnnnnnnnnnnnnnnnnnnnnnnnnnnnnnnnnnnnnnnntcttccaccagttccgtggaggtnnnnnnnnnnnnnnnnnnnnnnnnnnnnnnnnnnnnnnnnnnnnnnnnnnnnnnnnnnnnnnnnnnnnnnnncnttcagggcgctgaagctgtagcgaaaccccacgscgnnnnnnnnnnnnnnnnnnnnnnnnnnnnnnnnnnnnnnnnnnnnnncacaccacatctgacggacggtcctgcacaaacgtcagcgtnnnnnnnnnnnnnnnnnnnnnnnnnnnnnnnnnnnnnnnnnnnataccggcatacagcgcatcgccgagcagaaatcactgagmacntcccacgccttacgctgttgtgacaggtacgcattnaangtcatccgcggctctgtgcccccgaaaccannnnnnnnnnnnnnnnnnnnnnnnnnnnnnnnnnnnnnnnncatgccgtagcgcnggtgngtcagcatgtcccacaggcaccaggccgggttnttgctgtatgccggtttcaggctgccgtcccagatnccgctgtaagtgcgtttttccggntcatagtttgacggcaccaggatgatgcgaccgcggatatggtagttcaccgtcanctgctgacygccaaactgctccgcatccacctnnagnnnnnnnnnnnnnnnnnnnnnnnnnnnnnnnnnnnnnnnnnnngtgttcnggtagcactgtttcacatcgatgatttcggtgtatgacgaccagagcgttttgttctgcagctggtcnnnngtgctgtcnnnnnnnnnnnnnnnnnnnnnnnnnnnnnnnnnnnnnnnntcaccgacgccagnaactgcgaggtggtcttgccgttaatggtgacatccttttccgtcacccagttaccgttacgctgcaactgaatcagcagncggnnnnnnnnnnnnnnnnnnnnnccctttgaggtggtctccaacagtgactgcaccccgaaggtgacccgcaggcggtcaatgttcgcggangtaatggtgcgcgtcaccggctttgccttcgtcacttccacgcccagtgcggtttcagctccggangactcaaanccttccggnggtgtctgctcctgctccccgnnnnnnnnnnnnnnnnnnnnnnnnnnnnnnnnnnnnnnnnnnnnngcggggttttgttcaccagaatactctgcagccccttcaccggaccttcaatcggcccttcaccaatggcrtcaatcacgctcatcatctgcgtggacttaagattgtcctttgcctcnaccggcgtgtgccccytgccgccccctttacccactctgtccccctctcctgtctgatgtctgaatctgtttatgccagaaaacaacaggcaccccggagggtgcctgtgtcatgacggaataaaatttctgaaactcttcacatttccggcnnnnnnnnnnnnnnnnnnnnnnnnnnnnnnnnnnnnnnnnnctgcattacttttttgatgcctgaaaaataactccataacgttaatcttcatcgttctctcccgcagctccgctaactctgcgggatttttttattttcatccccgcccgataaccaccactttcccgtctccgccttcatcacgggtnctgatgtcctgggatatccgtcgtgaaccaaccagcatttcmccgtaaggcaccggcatcgggttcccctgagcaatcatnttgtccagtgacgaaaaatacgtgttctgtttaccgttannnnnnnnnnnnnnnnnnnnnnnnnnnnnnnnnnnnnnctgnnccacaccgcccagtatcatgctgnnnnccagtganaacagcatcgtggtggcagaaaaaccaccggctgncagggctgaaccccataacgccattgatgccccggcagtgaagaaagagcccacgatggctgctgcccccagcacaatnnnnnnnnnnnnnnnnnnnnnnnnnnnnnnnnnnnnnnnnnnnnnnnnnnngggcgtacaccgcctccggtgnnnnnnnnnnnnnnnnnnnnnnnnnnnnnnnnnnnnnnnntaccagccttcgttcatctgacggcggaatccnggcayctgcagcgacagggcacggatggcntccgctgccgtgttcacntacagnntgnnnnnnnnnnnnnnnnnnnnnnnnnnnnnnnnnnnnnnnnntgaaggcagatgnnnnnnagtggcggtgacgccagacagaatgcgttcgtcgttgccatttttcggaatacctctcccgtttactcagttgttcaggcagatggtgaagcagctcaccgttgccgcagtatatggcggcatgattggccaccgatgcgccaaagcagcacagcaggatatcgcccgcctgtgcagaggacaggggcacccggtaaaaaccagtcgccgccatattgtccaggtanaggttctgaccgttncgccaccagtcatcctcncgnnnaaaatnnnnnnnnnnnnnnnnnnnnnnnnnnnnnnnnnnnnnnnnntgntaagcatcccggaacagcgtgtaacagtccgtcaccccgtgctcaaannnnnnnnnnnnnnnnnnnnnnnnnnnnnnnnnnnnnnnnnnnnnncggaatttntgaatntcnccccgnnnnnnnnnnnnnnnnnnnnnnnnnnnnnnnnnnnnnnnnnnnnnnnnnnnnnnctgcagccgccggtcagcctcgctcagccagggcagtccaccgnnnnnnnnnnnnnnnnnnnnnnnnnnnnnnnnnnnnnnnncaatctccccctgcatctctgcccgcagccagtcttccggtgcnatacgaaaatacgcctccggctctgnnnnnnnnnnnnnnnnnnnnnnnnnnnnnnnnnnnnnnnnnnnnnnnnnacgaagccgcacgactccgcaggnnnacanngnnnnnnnnnnnnnnnnatcgctgattcagtctgtgtcataaaacaggatttactgcgaaagtttattgatggaaaggaaaccgccaaaatnnnncnccatgccgcgcatctcacacccgcgcatgcacttgctgcatctgtccttacggatatccgtggtggggttgtcgaactcatccgccaccgcaggaccgtnatanccgcattcatctccccggtaatcccacatacaggtgttcgccagcatgatgcgaccgggaaacagcgctccgtccgtctccgtcggtgttgccagcacaaacgaggctgtcatggccgtcagctctgacatctgctccaccacccagcggtcnctcagctcctgctccgggtccgcttccggattgcccgccacaaaattcaccgcatccagaaaacgggcatacacccggcggcggaccaccgtggcccccaccaggctctgcaggtcctccgccatnccggtgacnagaccgaacagattngacaccgtcagngacgggcgggcactgctgcccttcccgttcatctcaaaaccgctgccgtcaatcgggtatgcctgatattcccgcccctgccaggtaaccgcctcccctttttcattcagctcattgcagaaaaaataccgctcaccnccctgcaccgtcaggtcgatttcccagagcaccacccgcggtgactgctctganttaaccgactcgttcaggcttnnnnnntgaatatcctgcatcagttcaccacctgcttaaactccgcgctgaactcaacgcgcaacatcccgacccgcgcagaccacccggcacaggtcacctttatctgccggtatgcatagggtggcttccacaaaaatgcnttccagcccccgtgctctgccagraatgcctccagatgycgggcctcctcccgggtcacggaaagcgtcacncggtatgttttcaggtcagcattcagcccngccgccatacgctgygartacccgtcaccaaaacgcacttcacgcaccganggctgcgagttcacctccatatccggcttcactttccagcgaaatgttttcatcgcccgctccctgataacataccgccatcacgcaactgcagccggagctcatcctgcgnnnccttgcgggccatgtcatacaccgccttcatcagctgcggccccgcctgtccgttgataccgtcgttctgaatcaccacgtgattgttctgattaaaattaatnccttccgnccgccgcatctgcgccggacttccggcaccrcccacataaccaccttccgcatagccscgcatcaggcggtacaggttgccgacaccaatccggctggttgcctccttcgtgaagacaaantcncnnnnnnnnnnnnnnnnnnnaggntcatattnncnncccgtccccgtaaatcccccggtcgcgaaatggaagttcgccgccgcagcctcaatggccgtccccgaggaagcagatgcaccaccaccgaaagcaccgccaatggcgctgccgatacgcccgacaatgcccaccatggcctgtttaagcagnatttctgtcatcatggacagcacngaacgggtgaatccccgccagtctgcctctgcaccggtcagcatcgccgccatattctgtgcaataccgtcaaaggtctgcgtggcngcacttttaacctgcgaaaaactgtccgtcgcactttccgcccactcgccccagccggacttcagcccggccatccagcttccacgaagctgctcctccgcagaccaggtgttcttcagtgccgatgtggccttcgccagcgcagccggattatcaccgtacacgtcccgaagacgctgcgcttcagactcccgctgcgcctgacggtcagtgagaccgcgggcttttgcgctgatggcngcctgcttcgngctctgctgctnttcaaaccgcaccgcctgctgtgccagctcattcaggcgtttctggtnttcaaccttgtcgccnagctcagccagctggcgtttgtactccagcgtctcgtctttatgcgccagcagggatttttcctgctcagataactgtcgtttcgtggcngcctctttcaggaccgcatactgaytttccgcyttccataaatcacggcgctgccggctgattttctcattcgcaccgctgtgtttttccagcgtcctgagctcagcttcaagggcaagcagagcctctcttgcctgctcctcttccctctccccggcagagcgcgttttcggtgatgtatgctttttacctgtcagctcttcagccagacggctgacggcttcctgctgcccaggacctttgctgacgcctgttgcacgcgagcggttgatgtaccccatttccccctggcgtatacgcgcatcccgttccgcaatggattttctcagcgccagttcatcgcgttttgttttctcaataaatacgcggttctcttctgccagttcaccaaacaacgcaccaacgccgggcacattctttgtcgtttcccaggctgactgaataaattcagccagcgccagatccccctgcacaagcagcagcttcacctgttcaacggttcctgccaccacgtcagtgatcagactgagtgcccccagtgtatgatcacctatccatgcccatgcgtcagaagtccaggttttaacatcgtcccagattttttccaccggcgtggccgctttatcaagttgctccagacgtgcattcatgacatccgcaaacagggacatcgcctccgtcaccgcagcctgtttacctttcgtgcgctcaagctcatcaatatggcgtaactgggaaacgctcaggaagttatactgctgattcagggaggccagcgccttcaccggatctgctgcaatcccttcaaaggctttttccaccttcccggcatcgtcccccaccgtctgcagccatctctgagaggtttcccccatgatccgtagctgcccggcggtatatttcccgctttctgccagacgggccagattttctgccgcctgtctgataccaccaccggcttcatcgctgatcaccccggccattttccacaattctgccgttgtggtggcagccgcccctccggtcaggatcagtgaacgcaataaggcccggtcagcctgctctgcctgccaggcggcggcagcaagcgcggccagtacggcaaccccgccacctgccgccacacgggccaccgacataaatcgtcccagctcaccggcattccgggcattttcagccagtgcatttgccgtatctgacagcgactcctctgatgattcagaggcatccctgatcccgagaagttcctccttcagcagggtaagcaggctgagcggtccaccgaatgaatcgctgatctgccccccctgctgcagcatgataaggaagggattctgaccaccggcaagctgagtgacaatatccgtgaactgtgcgggcagtgtgcgcatggcagccttatactgtccgactgatatcccggctttttgtgccgccagcgcctgtcggctcagactctgctcagcagcatcagcctgttttctgaaagactgactgactttcccggacatcaaatcagcaagcgcactggtttcacccagctctttttttacccgcgctgcctcttcagaaaaacgggcagaatccagtgtcagcacggctgtcagatcggcaaaattacctgccatcgtggtcacctcctgaaatgtcctctgatgccatcaataactgtcacaacctccttccctcctccccgaaacggactccaccggcnaggcccgccgccttctgcatcagtacatcattttcgtccggcgtctccgcctgncnnnnctcagcctccggagcgaacaggctgaaatccgccggatgcatatccggatcgcaaaaaaacaggctgagtacggcgtacgtcagcccggaaaaatgcatatccagntgggtatcctgaaaataatgcgtgcagtaaaaacgtcgccagtcggcatattcggtggatgtcatcccggcaagcatggcgcgccagtcggctctccccatctcacgcgccagtttcaggacaaagttcagctcaccttcgaatgcttttttgatgttaccggctctgtcgcttctgctttcccggttggttcaggatcggcatcgtgccggttatccagcatacctgaaagataaagcacccggttcgttgcctgattcagtgcatcagcaggccatcccagcatcacttcacggcggatctgctgcatctctgtctccggagaggccagagtgcctttgagggaatgggaatgccatagcgacatcgccacaagcagggatgccgtttccagatatcgctggttaatgtgcacggcatnatgctccgttgtctcctgttgtgctgcgtctgaaacaaacttcatataatcaaaccgctgcagcgcagannnnnncganagcgtgacggacaccccgttatattcaaattgttctgttttcagaaacatnnnntanctccgtttaccctgcagcgcccgcttcagtaacggtgacttcannnnnnnnnnnnnnnnnnccatttccgctnaccacagggatctgcrccttacctgtcgccacgccgtttaccgtaattgtcatatctttcacactaatggtggctttcgacggatcggtggaaaccgctctgaacgtcttgtcngttgcactttccggctcaaaagaaaccgtcagggtggttgttttcccttttgccaccgtaccggatgtnnnnnnnnnnnnnnnnnnnnnnnnnnnnnnnnnnnnnnnnnnnnnnnnnctnacccagccacggaacacatccaccgtncnnnnnnnnnnnnnnnnnnnnnnnnnnnnnnnnnnnnnnnnnnnnnnaccagcctatnngccctttctnnnnnnnnnnnnnnnnnnnnnnnnnnnnnnnnnnnnnnnnngccagcgtaaaactggtgtcnnnnnnnnnnnnnngcccctgcccggtnnnnnnncagtcngcntcntcatcatccagatagttatcatcgtaggattccgccgtcatctcgccnggggtcagatccttcaccttcgccagtcgctgccagtcatcgtctgacaacgggtttgcataagcatcacccttgccgttgtaaacccacnnnntggtaccggaacctttcaccggctcaagaggatttggtgttgccatatcgtcctcacatctcgtangtaattttccacaggagatctgccgatccccacatcataaactcatcatcccggcggtagtcatacccctgaagattcatcttcagcagtaacgcactgnnnnnnnnnnnnnnnnnnnnnnnnnnnnnnnnnnnnnnnnnccgcctccagcgcaggaagaattttctcttccatccacatatccagtaccgagtccggttcttttgccctgagaaaaacttcaatatgcagtgtcgcctcccaggttccctcatcaacgaactcgtcagcagcagacgcatcagtcaggtaaacagcaacagcaggcagttcctgttcatcaataaaaaccgggcgaccgtcaaaccagctcaccctctcagaaatattttctttcagggcagacagaactgccgcccgtatttcacggtgtttcatacaccctcccagtcattttcttttcagcaccaggcgtaactgatgcgtcatggctttcatcatctgcgccggtaatttttcccggtacatccggtcccgttcacgttcaaaggtttctgccagcggtccggcagtcgtaatcttcaccacttcgatcggcagacggtggcgtttcggcctccctttgctgtccgcgccggtggatgatgatgcccacggcatacgctgcatcacatgccagcgtccgttagccagccgggtgataaaggcgtccgggatccgtcttttccccacaatcagcacactgccgccccctttcagggccgcacgctgtcctttctttctctgttttctgcgggaaagtcgaacgcgggcctcccccagtttgatggcgggcaggttgccggtattgatgtaaacctttgcgtaaaccttatccggtcgtgccggacttaaccggatgcgggcacggataagacggcgnggaacngccagctccctggcaaccgaagaggccgttttcgcnnnnatnnnnnnnnnnnnnnnnnnnnnnnnngtggcnnnnncccggggaacggcacggcggtcaattgcatccagatttttcatggcctgcgccagaccttttattgccatactcattcctgttcgacaaaaatccggggtttaccgttgtacgtgtcataacgggtcaccgtcagtgtgcgnccctcaaacacaacaacatcatgacgggccggacggtaccgggctgaaaacaccaccagtgacaactggctgcccgaaagcgcccccatctccgcggactcttcctccggcatcacgtcatacacgacgccgttaatctccgcctgtttgcccatcacccgaacggtcgccccgtccatccggcaacacattcgcgtaaacaggtcagacattgatttttaccgccacagtggcgctgtttgcaggagcattttcccaggctacccccgcggccaccgcaccgtctgcagccagctgcacaaccccgtccttcagataaaccaccgcgccggactgaatgtcgtcagcagactgtttgggcagcaggaacacgccttcggcaaaaccgtcaccggcctcaccggcaggaatatcggtaatggccacggccaccatactgccgaccaccaccgcagcaccgctcaggatggtctgatctccggcattcaccagttcaatggtggtaccgtcctgtacaaaatttttcgccataatgctgtttctccggacagcnccagtgnnnctgttttnnaggcataaaaaaagccctttcgggcagtgattgtgataacgcggttatcaggccaccgacgaacgcaccagtccgcgccagtcaagcggtgccacaccggcatcaatacgaatttttgtggcaatgccgtcagtggtgaaaccttcctgctgatcaatgtatggcgtgtccacaccatccagccaggccacttcaatggtgtcagtgccctgtgccgccgccagataccaggttttcgggtctgccgcatcaagacgcgcttctgcaatcacctcagcaaagttctggatggggttaatgacaccggcgtttgcatccgcccctttcacactggccgatttgatggtctggttcgccaccgtctccagtgccaccggtaccagcataaaggccggacggatattcagggcgcgatnnnnnnnnnnnnnnnnnnnnnnnnnnnnnnnnnnnnnnnnnnggccgcatccagtccggaaacggagatccccccggtggcaatatttttgtgatcggcatggaacagcgccttaccgtcggacagtttcgggttatccgtcagcaccttgtagaccaggtcaccaatcgttgccttcgccgcacgccccatcttcatcggcacgtccaccagcatattcagatcatcattgataatggcctggcgggtgatggagaaaatctccccgtaagtggccagtgcaatggtctccttgcgatctgaggtggtgatgtatttatactccgccccctcacgaacctggcgcagagaaccaaaaccgcccatccccacgcgatacgctgttttgaagtctgacaggcgtcccttacgggtccacttctggaaggtttcttctgattcctcccagccctggatcagccccttgttcgacacatccagcagaatattgccaaaatcagaggtgctgtgcgtcagcgccagcccgaccatctgcatggggttataactggccaccccaataccgcgctccgtcagtgacatgcgagcccattcacgcagggtcatnccgttataggcgttatccttctcgacattttcaaatccggcacgggccagcatcgcctggcggatcccgtcccccacaaaattgccgtttcnngcataaatatgggccggtgtatttttgttggtcggcgaggactcytgcccatttcattcagcagtcgttcacgggccatttccagcgaacagtcaggatcagccacgcactgtgcctgaagcgtctgatagcgaccgccgaacatggcaaacagatcgttaatgcctgacatgcgggctttctnnnnnnnnnnnnnnnnnnnnnnnnnnnnnnnnnnnnnnnnncgaatggtcgcctcatcagacactgccggtaccggtgatggttctgttaccgccggtgcagggattgtcactgtggtatcacgcggggcactgttgcgtggcggagtaatcatgtttcggatggattccggcatctttttaaattcctctgtacgttttgactgaatacatgccattgcctcaacagcgggtgtcacctggtcagcaaatccgtgtgccagacattcggcaccggacatccaggtttcatccgccagcatggcggcaatttcatcggtggtttttccggttttctgcgcataggctggcaacagtaccgattcgactttatccagcaaatcggcataactgcgcatatcctcagcatccccgccactgaatccccatggcttatggatcatcatgaaggcattttccggcataatgaccgtatcaccggccatcgcaatcacagatgccatcgaggcggcaacgccatccacatacacggtaatggtcgccccctgatttttcagggcattaaaaatggcgatgccttcaaagacatcgccacccggtgaattgatatggagattaatgtgggtgatatcacccagtgcattcagttcgctgacaaactgcttcgcggtaactccccagaaaccaatctcgtcataaatataaatatccgcgtcacccggccccccagcctgcatcctgaaccaggatttattcttcatgctggctttcggtgtcgcgctgatactgtcgttcagttccggcactgttgcctcctttgtcgttgacggggtcagtatcaaagaccagccccagtctgctgttttcatcaatttcagccttgcggcgacgtttgacctcatccggattgcgcccaccggcacgcacccagtcagattctgtcgctgcaccaccccggatctgaattctccaggcttcagcttccttaaccgggtcgatccacggcatcaccggaccggaatacgtcgcgttatatagcgttttcatctccacatccgccggaattttcagcagacctgccgcaaccaccatattcagccatgtccggtacaccgggcgggttaccgcgccaataaaacagtcctgcaggatcaggtaaccatccgtggactcgaccagctcctgccgctgggcgctgtaggtgccgttatagttacgcgccgnactggaaaaactcagacgactgccagctgccactgcacgcaactggccgttgcggaaagtttcaaggttgggattgggacggtcagatttgaccatgccgatatcctcgcccttgcgcaaatcgtcataaataatacccggggtgatatggacttcccgctcggtctctttgctccccggatcttcatagtcctgtccgtcacctttacggatatacagtcccagcgccgcagcaatacgcgccgctgtcagttccgcatcctcatactccttaagggcactgatccgcatcagcacccccgataacatggatgagcctcgcgtctggtgcagacgacgagtgaacttcaggtggatcatttttccggcagcgatttctttcgtatcactctgccggccgctgaccggataatttttataaaccagatattttttcggtcttccccactcatcaagaaaaaccccctgattcagtccggcggattcatcagtgcgcatgggaacaaaatccggctccatcgcctcaagccagaatggcactcccgccgtccgttccagaccgtttcccgcaccactgaccatctgcgcaaacacttcaccatcccgcagccaggtccgcagcagtaaacgttcaagcacgggacgggtatactgccctgtcacatccggactcacggaccattcagcccacaaccggcggatatccgcagccagctctgccgccatttccccgttttttcgtaatggctgaggctccacaataattcccctggcaccaatcacccgctcttccagcttgtcaaacacaccaatcaccaggtcatgattgatatccagaaaacgggcctgctcccgcagggaaaccgcaccgtatttactgagctgatcagcagagcgattttcccgccgggctttatgtgtccgggtcggtttcaccgcctcataggccatgattaacgcccttgaacgcagtctggctgctttccatccgggggaaaacacgcctatcacatcatcaataattgccattaaaacctcgccagtttaaatcccggttttccccgcctgcggctcaccatcgcggcaagcctgcgttcccactcctgacgtccggcgcggatctgagaaaggctttccagcgtcagttgctgcccgttgaaggtgacagacttcccctccagtacggccatttccgcttcacggtaccgctgtatcatttctctggcttcttctgtgctcacaaccagcctcctgatgttatccatggattatcttccgcacgctccgtccgcagttttttcttccggcgacggcgtttttctgccccggccgtcagttccggggataccgtttcaccagaacgctcctgcgggaagacgagccacgtttcccgctgtgcccagtccggtgcggagggccagcggatcttttcgtaaccatgcagaacggcaagcgcatccgcataaaccagcaggtcaaacgcttcgttagcgcccctgcccggttttcgccattttccgtcactgccacgctcttcataggtcagctcatcgtaaaaccaccgccccagccagtcgggaaagtggatatagttcggccctggtgtgtcacgccacagggcattatttacacggtccttaaacgcatccgtctgaaccagccacagcgcgacatcgccactggctctggcacggcgggcacttctgccggtattatccgggaaggttcggttaatcagcctgtcacggngaagtccatcccccttgaacagaaacaccctgttgcctagtccgtcactccggcaacgacgccagaaacgataggcgttatctgtcaccccggcttcccctcccgtatccaccgccatggccatcagacgcatgcgcacatccggatcagaagccagcggccatgttttatggaacacatccgtcagcaacaaatcccagtcctccggatatgccgccggatcaaccggcagactttcaccgttgggactgcagcgcagtgaatgccggatgttgtagcgatcaacaatccagcgttccccctgctctccgtatccggtgatctgcacaacaaaacggcgatttttaccgccctgtacgtcaaccgttgcctcaataaaacgcacaccatccggcncagatcgccggggaaacggctcggcacgctgttcaagcagttcacttttacgctgttccgtggctgaacggggcagatagggtcgtccgatatcggtgttcaccaccgctttcagggtctcttcactgccggttcgctcatactcttcttctgccgccagcagtttaaaaatcagttgttcccaggtctgaaacgccgcagctggcccctccatccaaaatgacgcaatccgggagtttcgtggcgttccggtgatactgccgtccgccgccgcccgttcaccttcacgaagccagatcccctggttattcagttcgcgtttctgctcaggggcaatcagcccgcgacaatgcggacacatcagacgggcagcctgaccggcagccacaaaatccgggttattccggtatccggtcatgttatccatcaccggctgaaaatattccccgcagtgcggacacggccagtaccaccggnggcggtctccccggttatacagtgacaggatacccgttgttggcggtgcctcatgtgcgccaccacaacgccatttggtatcggtgatatcccgccccggtgaactctcgaccagggtcatccccgaggacataaaggtggtggtacgctttgaggccagcgtgaaggcatccccttccccgtccacgttttcagggaaacggtcataatccgtcagcgccacacgacggtaatccgaagaggaaaagacggtgatcgacggccagccaatcttcaggaaggagccgtcaagaaacattttatcgtggacgttgttgtcattacgggaaggactgaggcgcttgctgacctccggactgtggcgaaacgtcctggaaagacgcgttctggaatgctcacgcgccttcgtctcagtcatctgcaccaccagcatatccgccggatcacagatgatgccgtacacaatccagccatcaatcagcccttcggttttcccggttcgcgcaggtcccacaaacaccaccgcgtcatattcacgggctgataatgtattaatggggtcaatcatatagggcgtcagcgatgactcccacggaccggaagtattggctccccgtggaacccgcatataacgcctgatggcttccgctactggtaaccggctgggtgggcgaaacagcgaggccacttcgcgccagatatcggatgcgcggctatggctctcgttcacctgattcacatatcggcctcatcacaacagtcaatgactgccttttccagtgtgtcgcggatctcatcaaccacaatctgtacttcattcagttgtgatgcggtccaccccctgtccctctccagccggtcaggccaggtttccagtacctgaactatcgctttcaccacgacagaaaaggaccgcctgacatcactgactggcacaagctgaccagtttcntgnnnnnnnnnnnnnnnnnnnnnnnnnnnnnnnnnnnnnnnnnnnnnnnnnnnnnnnnnnnnnnnnnnnnnnnnnnnnnnnnnnnnnnnnnnnnnnnnnnnnnnntgtgtatcgtttttgattatycccgcacactnnnnnngaggnnnnnnnnnnnnnnnnnnnnnnnnnnnnnnnnnnnnnnnnnnnnnnnnnngttcaggcactgagtgcggatatagtcctgtgcnccttccagttgcttctgcattgccatcaaccgttctctgaggatgaaataatcccgttcagcggtgtctgccagtcgggggccggttgcattatccacgcnggaggtgcnnnnnnnnnnnnnnnnnnnnnnnnnnnnnnnnnnnnnnnnnnnatccgcaggcgcttacgaccagcggcaacatcagcacgcagagtttcattttcagctctcgcatcggctaaytccctcgagtattttgcatcgagnnnnnnnncatcacgctggcgtacctgcatatcagtannggtggcattcgcctgttccagctctctgncttttttatcgnnnnnnnnnnnnnnggtgagcgcgttgtcacggtaatggnnnnnnnnnnnnnnnnnnnnnnnnnnnnnnnnnnnnnnnnnnnnnnnnnnnnnnnnnataatcaccacacacagaacacggttcatctctcnnnnnnnnnnnnnnnnnnnnnnnnnnnnnnnnnnnnnnnnnnnnnnnnnnnnnnnnnnnnnnnnnnnnnnnnnnnnnnnnnnnnnnnnnnnnnnnnnnnnnnnnnncccggtagcaaacacactggcaatgtttttatccngtnnnnnnnnnnnnnnnnnnnnnnnnnnnnnnnnnnnnnnnnnnnnnnnnnnnnnnnnnnnnnnnnnnnnnnnnnnnnnnnnnnnnnnnnnnnnnnnnnnnnnnnnnnnnnnnnnnnnnnnnnnnnnnnnnnnnnnnnnnnnnnnnnnnnnnnnnnnnnnnnnnnnnnnnnnnnnnnnnnnnnnnnnnnnnnnnnnnnnnnnnnnnnnnnncnngccccatccccgcaacgacannnnnnnnnnnnnnnnnnnnnnnnnnnnnnnnnnnnnnnnnnnnnnnnnnnnnnnnnnnnnnnnnnnnnnnnnnnnnnnnnnnnnnnnnnnnnnnnnnnnnnnnnnnnnnnnnnnnnnnnnnnnnnnnnnnnnnnnnnnnnnnnnnnnnnnnnnnnnnnnnnnnnnnnnnnnnnnnnnnnnnnnnnnnnnnnnnnnnnnnnnnnnnnnnnnnnnnnnnnnnnnnnnnnnnnnnnnnnnnnnnnnnnnnnnnnnnnannnnnnntgactntattcacttacattttnnnnnnnngcaggatttcntgttatccgtccannnnnnnnnnnnnnnnnnnnnnnnaaaatattcnncttatctgtcgatnccccannacgccagcgcgctctcctggtcacgacgggatacctnnccgtnnnnnnnnnnnnnnnnnnnnnnnnagtctctnncaccgtccttaatccaccagcgaatcgcntnnnnnnnnncnnttcnntcncctgcattaattnnnnnnnnnnnnnnnnnnnngaaacacttaccgggaccaatgttgtacggacagaatgacgcgatccccgctnnnnnnnnnnnnnnnnnnnnnnnnnnnnnnnnnnnnnnnnnnnnnnnnnnnnnnnnnnnnnnnnnnnnnnnnnnnnnnnnnncgcatttttccttngannncnncnnnnnnnnnacgacaggtttaccatccaccaggatggcaccacggcagatggtccagatnccnnnnnnntcacggtatgccgtggtgtggttaccttccttttcatccagaaactggtcgaggatttcaggcgcagaagcacctgcaccaatcagcgccnnnnnnnnnnnnnnnnnnnnnnnnntgatttttgcgnncatggatattnnnnnnnnnnnnnnnatttcaaatccctggatatgttannnnnnnnnnnnnnnnntggagtcttcagagaaccagtaattcttcccggtagctttcctytgtaggttatcannnnnnnnnnnnnnnnnnnnnnnnnnnnnnnnnnnnnnnncaacggaccatccccttcacataacccggcarcaayatccatgaaaaactgcttcgcctgytttttcgcctcagcttcgtaaaactccagcgtggcwccttcagtacggtcaagactaatcgccacatgtggcaacaacaacgacggatgcnnnnnnnnnnnnnnnnnnnnnnnnnnnnnnnnnnnnnnnnnnnnnnnnnnnnttatccgggtaattatttatccntttaacaaccagttcgtatttnnnnnnnnnnnnnnnnnnnnnnnnnnnnnnnnnnnnnnnnnnnnnnnncaaacagcagactncccagcacacctatcgccacccactgggacggagagactttgtccagcagctgcagtaaccagtatcccgtccccaccgctgacgtggtgtatgacacaccngttgtgattttttccatctggtacataccccgtctcccnnnnnnnnnnnnnnnnnnnnnnnnnnnnnnnnnnnnnnnnnnnnnnnnnnnnnnnnnnnnnnntccagcaccagactttctatctcaacgccatacgctgcattttttgtaacatccgtcagcgtcagcgcattcagtcccagtgtcagactgtcttttataacctggaatgccgggccagccactccattcagtttcggagtaaccgtggcactgccggcggtgaacaccagctccagcgtctgccagtcgttaccgtaatcgccgaactcccccagcttcgtgtnnnnnnnnttcctgtgatgcatcagattcactctgccgtcagtggtctgagtgaagtacgacatcaggaacggattaccrgtacccgtcatcgccacaccatcaggaacgggagcatccgtatacagataaatccccagcccgaactgattgttggtcagtgcgcctgacaggcggaacttacaggtcagtctgccgccctgtgtcagcagggtaattgcgtcatccaccggatgcgtcagggaccaggttttattgctctgcttggtgatcttaaatacaccatctgacaactgaattccgccatccttaatgctccagccctgcgcagcagcctcnnnnnnnnnnnnnnnnnnnnnnnnnnnnnnnnnnnnnnnnnattgtgcgaacggacgtatctgcagacggacccgatggcgtgttgccgccgggcgagggtttgatttccggtgccttaccactgatgaaggctgaggtgcgcccggctgcgttcagaatagcggtnnnnnnnnnnnnnnnnnnnnnnnnnnnnnnnnnnnnnnnnnnnnnnnnccatgaantgaaatgtgtcgggcggtttgatgatacctggtttccattcgttctcgatgccgcannnnaatatcctgatgccggaatatccgggtnntnnnncggcgcgttagtggcggtattgacgccgttaccgtctgtcatgaagggcacaaaataaacgccctcactctcccnnnnnnnnnnnnnnnnnnnnnnnnnnnnnnnnnnnnnngtgtcaccacaaacccacggcacatctgcagcnctgccaccatggcactgcgcgttaaacacggagaggtcagcacgaaactgnnnnnnnnnnnnnnnnnnnnnnnnnnnnnnnnnnnnnnnnnnnnnnnnnnnnnnnnnnagaacgtttttgggatttttctgcaatgccgcttttgtgcgggaaatcagatcctgatataacggcttgcccaccccccagcgtgccgaatcctgactggcccccgtggactcgctgaatgtcccctccgcgccctgggtaaatgccgaaccaccacgacagcatggtaccagcaggatccccgcgttattcgggatatacgggagcagttttttggcaatatgtaaaccctgaccgacacagccgtactgccctttgctcaggtcagccctcggatgattcagcgtactcatatcctgcacatcatgcagacagtggtcagccggaataatatcgttatatctgcaggcagccccacccggcgtcactgtnnnnnnnnnnnnnnnnnnnnnnnnnnnnnnnnnnnnnnnnnnnnnnnnnnnncgcgnntccggagcatcgtatgaatccggcagcggaagcccttcaccgtaagccattgcattggactgnnnngccagtacgatgacgtagtaccaatccggctcagatgaagggccgacctgtggctctccttcaatagccaccgcctgcatcagtgtgtacggcgtaatggcaaccggtccgccgtatggctgccagccctctttcagtttgtgtgtcagcttttccgcaaggtctgacggcgacgccgccctgacaacatcatartgtttaatcgacatcgaatttctcccgtgtagaggaacagagttaaaaagccggaagcggaatcaaatcacaggatgaccatctgccagtnnnnnnnnnnnnnnnnnnnnnnnnnnnnnnnnnnnnnnnnnnnnnnnnnnnnnnnnnnnngtttgagaaaaanngaannaannnnnnnnngncaaagcatggtgccgggtgcctcccggtgaattcagtaycagcacctgaatccgcgattaccccatattccttcttgctgattgccccnccgcacagggggattcaccatgcagaagtgtttttaatannnnnnnnnnnnnnnnnnnnnnnnnnnnnnnnnnnnnnnnnnnnnnnnnnnnnnnnnnnnnnnnnnnnnnnnnnnnnnnnnnannnnanaatgccgcagaccagccccnnntccgccagcannnnnatgattctgctggtgaaatccaccatcaccaccagaaacagcaggagtgcagccacagtcaggcgcagtntnnnnnnnnnaggtaattctccagacgaagacccagaacaccggcaatctcttccagcaccttgcgctcttccggcnnnnnnnnnnnnnnnnnnnnnnnnnnnnnnnnnnnnnnnnncnncacatcttccgcnncacgcgtatcgtgtttcacatcctcgannnnnnnnaacgccgcacgacgaccagttttaaagttcgtatccagctgaccgataatggttgcnctaatcgcattnnnttnngnnnnnnnnnnnnncagcgcaggctgattacgcagtacctgttcgatcttnnnnnnnnnnnnnnnnnnnnnnnnnnnnnnnnnnnnnnnnnnnnnnnnnnnnnnnnnctgcanaggccaccaggtatgcggcgttaatcaccacctgtgccagatcgcgtttttcaaactttttaatttccgttgccgctctgcgggctttttttaccaaaaataccaaacatcgtgacgttcctttgggtnnnnnnnnnnnnnnnnnnnnnnnnnnnnnnnnnnnnnnnnctgcccacagagaaagtcacactgaccactccgtaagctccccccgaaaggctctgtggttggtatgcgccgggcnnnnnnnnnnnnnnnnnnnnnnnnnnnnnnnnnnnnnnnngtgaccgattgcttagaaggcaattgctctgtccngctgagctaacaacgcagratacmgataatnnnnnnnnnnnnnnnnnnnnnnnnnnnnnnnnnnnnnnnnnngatgagctaatggcggtatgtgatggtggcccttgctggatttgaaccagcgacctggcgattatgagtcgctcgctctcaccactgagctaaagggccgggcgcaggataataacgttacgaaatcaatgttgcaagcatacnnnnnnnnnnnnnnnnnnnnnnnnnnnnnnnnnnnnnnnnnctccaccagcgcattcaccatgtctatccgagataagtggcacaacaaaacccgcttgtgggcgggttttgtttgcttttgccatcacgtacaaaatcggcaaaatatcagatttgcatgaaatatatgcctttcaatctacttttgcaacactttgctttgaaaatgccgccttttgttttgaacgtgttctcattacaaataataaagcctcactatccagtcggtgaaaaatgtgtttcattgcaacccagtgacgagtaaatgttttggaccagtttttngttgtcactcccgccagtaatgccagctcctgatattcataaccttccccaccaaaaagttctgcttttactgcctgcgccgccagccagattaattttttcaggcgttcctgcgttttcccngcaatttttctggtaccggattgagtattaaattcattccacgcccactgtgttatcgcgatctgatattcccaacaaatactcccgctgtaacaccacaacaaccaggctttatgatgttcttcaagagacagaacagcccgccgccacgatgatgtcgaaaactcaaccggactgaccagaggaattgacgtcaccttcgccagcgattgctttcccgggattggtggattatcccgcgttatcatttttccagtcacttcatcgcggtaccggattttttttcgcctgtaacgccctgtatcgaacatggcattctcctgccaggcttcaagctgaccttttgttgnnncnnnnnnnnnnnnnnnnnnnnnnnnnnnnnnnnnnnnnnnnnnnncgcacaaactgtaaatantggttattcatgcgcactccagttctgtgatttttatccccagccgcccaccaggaacgagctgaccgcgcacaatannnntnnnnnnnnnnnnnnnnnnnnnnnnnnnnnnnnnnnnnnnnnnnnnnnnnnnnnnnnnnnnnnnnnnnnatgcgtcagcgcatccagcggngcttnnnnnnnnnnnnnnnnnnnnnnnnnncgcnnatccggtggctctgcaataatctttatcaccagccttccggnnannntnnnnntcagccgctgctggcgaacannnnnnnnnnnnnnnnnnnnnnnnnnnnnnnnnnnttttgatacaaaatangtgctgccangacgtcgccagtaggtattcaccgtcggnnggtaaggcaaaacaaactctatacgcatcagtaacctcttttacccgagcacgccgnnnnnnnnnnnnnnnnnnnnnnnnnnaaaaannaaatcaacctgggaaccatgcttttcttcgaacgccagcggatnnnnnnnnnnnnnnnnnnnnnnnnnnnnnnnnnnnnnnnnnnnnnnnnnnnnnnnnnnnnnnnnnnnnnnnnnnncctgaccntgaccaatcagnngnnnnnnnnnnnnnnnnnnnnnnnnnnnnnnnnnacacggctgtgtcttcacccagcgngnntatttctcatttacccaacggcgacgnnnnnnnnnnnnnnnnnnnnnnnnnnnnnnnnnnngatcaacggcaatgctnaccaccgtcttttcctgtggcggnnnnnnnnnnngggcgtgaggcagcggngcnagannnnnnnnnnnnnnnnnnnnnatgctggtggnngnntgntcnnccggtnnnatgtcgctttnncggtacnnnnagcggatnnnnnnnnnnnnnnnnnnnnnnnnnnnnnnnnnnnnnnnnnnnnnnnnnnnnnnnnnnnnnnnnnnnnnnnnnnnncaccaggataattcanccagagannnnnnnnnnnnnnnnnnnnnnnnnnntgcatggcgtatgacgtcaatcatccatgctgacaanntttgatgagcaagttgcncgannnnnnnnnnnnnnnnntcacncnnntggttgtcgcagtgccagcacaacaccattgcgccggtaccataacggtgaatnacggtttcnctgnnnnnnnnnnnnnnnnnnnnnnnnnnnnnnnatttnnnatgacgcaacagccagtcagacartgcaccagcnccaccaacagcacgaatcactcgctcntcgctgnnnnnnnncagcaatgttttgtcttccaccagcggctgnngnnnnnnnnnnnnnnnnnnnnnnnnnnnnnnnnnnnngctnntcggnnccggctnnannnnnnnnnnnnnnnnnnnnnnnnnnnnnnnnnnntcacgaccnggcttaaggaccaccagcccgagttccggtaccagaacaggtcgaagtaatacccgcacgttacctccagatgcgttgctggaatgtgcgggacggacgcggtgggcgctcggagtacggnagcctgacgtagattatccagtgacgataatcgaggctgagggctttcctaaactcatacccacgtctgcggtagttctgaatcagccattcggcctgttcttcagtgcatggggcgtgccggaaccagtcagatttgaatgcatgagaacgccgcccgtgcctgctggcaaagacggctgaattatcagaattgtgtagtctggaattttgcgccatcggctttctccggtggcacagtgttactcaacaggggttcagccctgcgctgaattgtagatgaannnactaatcttcaaaagcagaaaaaccagccttaatcccagcttctttcagagacggcaacgatgtgacaaattcatttgcacgcaaaatnnaaccatccgtcacaagcccatccacaaagtaaattaacgcagctccactcttcctatgtagagactgtaaacatttaatacggcagtggctgacaatagcgccattctcaacgcgcacagtatagaggccatcttcactaaaaatttcacgtaattcttcgattttcatcaacagaatccttccagataaatagcactccccctgttcggggtccatccctcttctccctgcgcgctacttaagtatttttgattctattccggcgccgtccggaacttcaaacgnnnnnnnnnnnnnnnnnnnnnnnnnnngaagcgggttaagtgcgggtgcgttgaggatgcctgacacatcagaggtggcgagggatttctcccccgcctggtctcttactcctcaggttcgtaagctgtgaagacagcgacctccgtctggccggttcggattcgtacctcgcagaggtctttcctcgttaccagtgccgtcactatgacggttaaacagatgacgatcagggcgattaacatcgccttttgctgcttcatagcctgcttctccttgcctttcggcacgtaagaggctaacctacatttgtgagacatagattggncctcagattaatgttaagcgtcttgcaggacgcgtaatgttaactggggcttttctctatctgccttttggtgttcatgcctgaggcagatagcctcaagcacccgcagcaattctacttaactctcgctttaccgcaaaccgtttttacccgatnnngnnnnncccnnatcgtaatgaattcagttccctagtcgatccannnnnnnnnnnnnnnnnnnnnnnnnnnnnnnnnnnnnnnnnnnnnnnnnnnnnnnnnnnnnnnccagtgatatatcatccgacaaattcagttccctagtcgatcnnnnnnnnnnnnnnnnnnnnnnnnnnnnnncacnncagcaacaacanccancnnaccttccattgccagtgatatatcatccgacatattccctcctttggtgttaatcccggcgaacgtttttacccccaccgacaaataacatatactaaaaaagcgatagccatagcaacgcctgtaattgcaaatgcttcaggccagttcattggcgcacctcctgcggcggttctggtagaggcatccagtgtgatggtatccacgacgcaccaggtattatccacccatcattagcgtcaggatgccccgggatgtaagtcgcccatttcattcgccagtcacctttcctgccaaaatccctggcaacaagaacggctgttttggtatccggcattcgctcactacagcttatccaactatccggagttaccggatagttgcccgatagtgcattctgctccagtgatgcttttacaaaccacgctgcctgaactataacgccatgaatccagcgcaaatcagcatcgcgatctttctttttcatcttttcgccacttaaggccttgcttatgtggctgcgtaccaggtcttcatgtaattccttcgcctcctcaatggtgaaaccaccaggcagaagagccggagttaccggagagctggttgacgcttccgggattttccgaaaannattggttgacgaatctttattttcccgaaagtttccggactgaagcatggcttcgcggcaatcgttccagcctgtagcgtatgcagtcgctttgctgctgccttcaactggcgcatcctgccaatacatttcttccggcactatcggcgctggaggggcggcaaatagatatccgccaaagtcaggaagctctctaatggcctgtacgaatttttgtttgcctacgtcaacccctaatgggtaatgagctataatctttgccaccggctctgcttccagcgatgccagcgcaatccgtgccagttccatttgttcaccacgggtaagcccgttttcaagcggatttttaatgaacaattcaatacgttctttggtaatagtggtcatgtgttactccttaacccgcagtgctttcaactgatgaggggaacaaaatcttttcatcaaaccctgcattcatatcatgaacagcaacacaccaatccatcgacgaacgattatcaagagcctccatgatttcatccatgcggcgtaggtcatacaggtaaatgcttttatcgccaatggtgtaaaagccaatttttttcggtgatggacagcgatcaagaacttcctgtaattcgttcaaccatgcccgttctttttttgtcaaagttgccatatcagttttccttatacggattaattttattgtgcagtgtgttgaatgacgcccataccacgtcgttatacaattcaataactggctcaattatttttccgattatccaggctaggattaacggggatatcggtatcatcaacacgataaacagaatgagaaacagaaattctgttgttctactctttcgcggatatttttttctaaataatgtgaccattcattaccgccctttcgggcggcctcctgacattaatcgttgtgataactcatagcttcatttgcagcatcaactggatcaacctccctccagcaataatttgggtcggctccttcaggcgtccacggttctaattcattttttgccgcattctcatcgccagtaattttaaaaatctnctcagagaattttcttgcccactcgttatatttttccgcattaatggctttctgtgtatttaacataaatatacctccagttaaggattagattttatttacagcgcnaaatttatttattcagttctggattttgtcgccctgcgtatccgcgctttcgcgttacgctcaatctgaattaacttttctatatttttccgcctttcctgttcctcctggcgcaatagccttacatcatctgccagtctgttttctcttttcgccacagagagcatccagtcaaacggctccacaactgcaccgcagattttacagcggacctgacgctctttttcgtcaacccgaacagaggcgtgatggcaatatggtctttccgatggctcataaagaaaattaacctgattacgagggttggatttgcccctatatttccatgctcctctcctttgatgcgaatgccagcggtaattgaagcctgatagctaatttcactcacagtaccgcctcctgaaaattaccctgatagaaagccagtacacgctgcatagcttcactcttccggcactcgcgacagattatgtttaggcgactgtcgtagcggcgtatttcgccgtctggtaacgaccagataaggtccggatcaaccacagatgtttttttcttcagctttgcccttgagagttttttgcgggcgttttgccagtccttacgagcctgttcagacgggaataacccgtaaccagagttgtatacatcgccactggcaaccagctctctggcgagaacgctcatcagatatcttgtcgcacctgttttcgcttccagttgtcgtaacgtctcacgcccactctggcgcacgagttcaacaacttgcctcttaattttttcccgctcttcttgtgtaaatacttttgccacaagtcctcctgaaaattacctcatgaccagaaatcaacacttaccccctgaagcccggcggaatttcggtatccggntcagaaatatgattcacacaacgctgtayagacgaacgccccaggcggataaccagttcatcccatttttcgcgaagctttgacggactcatgatrttttttacccagaatggatcccgctgcacccgaccaaacatttcrcaaatttgtctgtgagttctgccatccagcatccgcattgtgcgcacgtcgttggcccatgcggtccagttgggttctttcggtcgcgaaatctcgccatcatcgctggcggcctgctcgtaaagactcacgattcgcccccagatccactgcgcacacgccaaatcgtcctggctgccccactggcgtttttttgcactgaacacaaccgcgtcaggatgtcgggttaaaaaatcctgttcagncgtctgcatgtccggttgcgaagcttccggacganaagtgtttttattctctgtagtaatctctgttgtattctctgtaagatcatcnggccattttgacccgatgacattgggtcgttttgaaccaatggagcgtgtcattttggtctcttccatcgtgtcattttgacctgatggagcggcgcattttgacctgatggattcgctcactttgccaccatctaaaagctcgctctcgtaattaatcgtgtaaaaattagtcatatcacgctttgatttgttgagcttttcgcaacgcaaaagccccagcgttttcagacttgcaaatgcgcgttttaacgttgactctgaccagaacgggaactgttccagccattgttctgttgtgttataaatccagcgaacaccatcacattccatgccggaaccggtatctctcaaccagtaatgcarctgctgcaacacnatggcttcgttcagaccaattttcatcgccagctgcgtgtttataaccagcgggcgttcagcaaaaaggagcttcatcccctccccccccagaacacgttatcaatgcaccaccacggcatttcccgccggaccaccacgattcatctgattgaaaccagcgatcgccactgcgacaaaatcatcagcgtctctcaccagccgttcccgcgtctccaccagctcccgaaaatagnntgaactgtggctgcgcattcgggccaccagcagaggtggcattgctttttcgatcgctggtaacaacgcctgaatttttttaaccgcatcaggggtgtctttctccacccagcggaatattttctgagtattgcgagccagggcttccggatggctgtcgtcatacagttccgggaacgtcattcccagttcgaaatacgctttggtaatcttcgcagtcggtactttttcgccgtccggatgcgcccaggcattcatcgccatgcggatgtgctcatgcttgattttcatgaatcattctttccttcgttcgaggtgctatcctgcctcttgtaaagctctgggttgtatttcaattcaccgttagtaatttcatccagctccattgcgcgaagtttgggaataacagctttccaccgcacaacagccacatgtgaaatcccaagagcctcagctactagtcgctttnntttgaaatggcgcagaacatcatctttgaacataaaactctcctgttatttcgaacatgagggtaacaatagttacattgtaatgtcaaccatagtgacattgcttggtagtaacattgattacatgaaaaacactatcagcgaacgtattcggaatcgtcgaaaagacgttggactaacccaagagcaggttgcaaaagcaatcggcataactcgtgtatccgtaacaaaatgggaaaatggctcttcaaaacctgacggtgagaatttgcatctgctgtcaaaattgctttcaaaatctcctgaatggattctttatggaaaggacgatcacgataaaatcgatgttctgcgtctgaatcagcacctttacattagtgacaacatcgcccggttgcccgttttaacgtgggaacaggctggttattgggatatgagttgcccagtaaccgagattcctggtattaagaattgggttgatgtcatgacaaaaaccgctgaaaactcttttttattgcacgttgagggagattcgnngacgaactctaacggcctcccaacaatcccagacggatctaccgtgctgatcacaccatgctcaagtaacattagagaactggtgggaaaaataatcttaatccaattggaaggtacgccaaacgtaacactaaaaaaagttgcgattgacggaccaaacatctatctgttgtcactgaatccgctttacaaacccattgaactgaatgtcggttacactattaaaggtaaagtttcacaaatacatcaatacttagactaagtcagaacccgcattcattgcgggttttttacacccctggatgtacctcttgtaacatcatgttgacttcaatggtaactcttgttaccttaacaacatacccaccccgccccacagaacgccgggcaatacttcgagttaccaggcagtggtcaggggttaagtagccagcccgaggcgtaagaacatgacggcagggttcaacttnnactatgcagcaggtttttgttccgctaccccggcgttaaggggatatgaggtcagcatggatactcttgatcttggcaacaacgaatctctggtrtgnggcgtgtttcccaaccaggacggcacgttcaccgcgatgacgtataccaaaagcaaaacgtttaaaaccgaatctggcgcgcgtcgctggttagcaagaaactctgactaatgaaatctggtaattaaggaatcctccacggggggagagtggtgcacacgcgccggacacaagcaagcatccggcatgctctttaacaatctggatatccataacagtaaaaatctacagattgccgttcagttttctggccaactcttcaakagatggaggygatacgtaatccggatttttattcataagaaactgattttcacagtacaggcacctgcttttatgaaaaaattcatattctctaaccgggaatggctgaagtatcgatactatcttttgtccaaaacattttggacaaagatgcatgattatgctgccgccgttcacggttacctccttcgagtacacaaaagttcccgactcaagttggctaaggatataaccttccgtctgagcctcaaagttttcaaattctgcaattttagctttgagagaagcatttatttcttgataagtgcccaccagctcaacgagagacacgcattcgcgctgaatagatgcaagctttgagttcagttcaccaatagccgcatttacttcagcttgagtttttgcctcgttcattagttttgcaatctgggcggtttcacgaatagccgtcattgctgccgttaattcagcgatcacattcaatactcttattgttgttggggatatccagattaacaagatccttgttgttggggaataacggggaccacctcgcctgacgtggtaaaaagcaggcacacaacacgaaagcacacggcgaggttgctggttcatagatagcctatcgttaaattttcgtcgaccgtgcgcttccggttgtggcartccgcgaaatggcgcggcggtaagtatggctggggtttcctccattgctccagaaaatgcaccgggttgtcaggttgaccatacgcttaagtgacaaccccgctgcaacaacccatgttgattaccttttggcgggtatccgttttttgttttcccttgtgatacccgccctttttaaagtgaattttgtgatgcggtgaatgcggctmagcgcacgcggaacagttaaaaaggccagttgacttccgtattggttcttatgggtggrttctctgtatccggcgttaattgttaactggaggcaccaggcacygcatcacaaaattcattgttgaggacgcgataatggaaacgttattaccaaacgttaatacgtctgaaggttgntttgatattggtgttctgctcagtaataaagcgtttactgaggatgccattaatatgcggaaatatgagccttatctgctcaatgataattccatactttcccgaattgctcttcttgaacttggtattttcggagaacagcagtgacctcagcatttgcactggtgatgaccgtttttcttataacgggtgagccgcagaatgtaattaccggaatttatgacagtaagtcatcctgcattcaggtaagggacgaacaaaaaatccccggtgaatgcctcccgttnaaaaaagtgtcgctgaacctgaataacgaaataccggctggataaccctccagccatattaacgccataccaacggattaaaaataccagcaatggcaggaatttgttcatccttaaaatggttatgaggtttatcaatgaacgctgataaagaagaaattgcactatattacgaagccaaaaatgacaaagtcagaaaacgccttgggattaaaggtggtttttactggcncnnagcaaaaaaattatcggttgcaatntcacgcggtgttgctgcaatggacgatgccggatttgacgaagaggattttaaaaaacccatccgcgtccatttacccgttgtgaatgaccttccaccggaaggtgtgtttgatactgaattctgcaaccgatacgaaaaaggcggagaagatggtatcacaatgatacttatcgcgccctctgttccggacaaaccagccagtactgacaataccaacgtcaacggcgaagacatggctaagattgaggagaatatgcttcttccggtttcaggtcagattctgccnnttcgctggctggcgcaacacaacagcgaaaaaccggtcacgcacgtttcactggacaaactgcnngcattacataacgcacaggatgaaaaacttcccgccgttaccgcgctggccatctcaaataaagcagtgcaactcgaaccgctggagattcgggatttgtacaaactggtgcgagacactgacaaagttttccccgcccccgtaaattcggacctgggactgatgacctcttttatcgaagcatacctgggcgctgactacaccgatcgcggtctgcttacaaaagagtggatgaaaggaaatagtgtttcacgcatcagccgcacgccatccggcgctaacgctggcggcggcattcttaccgatcgcggcgaaggttttgtccacgatgatgcgtcagtggcgcgtgacgtagccactggcgtactggcccgttcaatggacgtggatatttataaccttcatcccgcacacgctaaacgcattgaggaaattatcgctgaaaataaaccgccatttactgtgtttttcagcaaattcatcaccatgccgggccacaaggattactcccgcgccatcgtggttgcgtccgtgaaagaagcaccaattggtatagaggctactccccaccgtgtcaccgaatacctgaataaggtgctgactgaaaccgatcatgccacccctgatccggaaatcgtggatattgcctgtggccgctcctctgccccgatgccgcagcgtgtaacaaaagaaggaaaacaggatgatgaagaaaaaccgcagccatctggcgcaatggcagatgaacaggcaacgactgaagcagtggaaccggatacaactgaacataatcaggacacgcagtcgatggatgctcagccacagataaattctgttgatgcgaaatatcagaaactgcgtgcagaactccatgaagccaagaaaaacattccacccaaaaatcctgtcgatgcagataaattactggctgcttctcgcggngaatttgttgaagggattagcgacccgaatgatccaaaatgggtgaaggggatccagagtcgcgatgatgatgaccagaatcaggataaagcggaacaaaacagcccaaatgcgttacaaaacgagccaaaaacaaaacaaccagaaccagtagtgcaacaagaaccagaaaaagtttgcaccacatgtggtcagaccggtggcggcaactgtcctgactgtagtgcggtgatggggaacgcaacctaccaggaaacattcgatgaagagaatcaggctgaagctcagaaaaatgatccggaggaaatggaaggcactgaacatctgcacaaggagaacactggcagcgatcagtatcacgccagcgataataaaactggcgaaacagcaaatcccttaattaaagtgaacggtcatcatgaaatctcatccaccagcaggttgtggcaccatctgatgattgaccttgaagcaatgggaaaaaatcctgatgcgccaataaacgctatagccggtaagttttttgatccggcaaccggagatatggggccagaattcagcaaaactatcgatctggaaaccgcaggcggggtcatcgatcgggacaccattaagtggtggctgaaacagtcacgcgaagcacaatcctccattctgaccgatgaaatcccgttggatgatgcactgctgcaattacgggaatttatcgacgaaaactccggtgaattttttgttcaggtctggggtaacggtgcaactttcgacaacgtgattttacgccgttcatatnnnnnnnnnnggatcccctgcccgtggcgttacaccaatgatcgcgatgtaagaacgatggttgctctgggactggtgatggatttcgacgcaagaacgactattccattcgaaggtgaacgccataacgccctgcacgatgcgcgttaccaggcaaaatacgtttcagccatctggcaaaaactgatcccgagtcaggctgatttttaatgttcaacccggatcgccgctaacnnnntatanttagcggcggttgtgagatatagctatgagcagcatatttttaaccgaaaatgaattgcaaacgttaacgggctgcaaatatgcaagccaccagcgcaactggttaataaaaaatgggcttccgttctataccaatcgtagtggaaaaccgatcgtcagtcgggaactgtttacctgtataaaaactttaccaccacgtgaggctgaacctgatttcggtgcgatctaatgggaagacgaaggaaaaatcccgaacacgaaaaattaccgccaaaggtataccccaataaatatagtgtatggaaaccgacatccagagaatctgtaaccttaactgcaatcgaggatggtttagccgcattatggaaaaagtatgaagaaacggttaaccatcgcgatcgcgcaatgacatttgggcgtttgtgggaaaaatttctcgccagcgcctattacagcgagcttagtcctagaactcaaaaagattatctgcaacatcaaaaaaagttgctggccgtattcggtaaggtgctggccgattctgtaaaaccagagcacatcagacgatacatggacaaaagaggcgagcagagtaaaacgcaggcaaaccatgaaaaaagcagtatgtcgcgcgtttatagttgggggtatgnnnnnnnnnnnnnnnnnnnnnnnnnnnnnnnnnnnnnnnnntaagtaaattcaaggcaaaannnnnnnnnnnnnnnnnnnnnnnnnnnnnnnnnnnnnnnnnnncgatgtgttatctctgaaatggnnnnnnnnnnnnnnnnnnnnnnnnnnnnnnnnnnnnnnnnntctttatccagcaaggtaaaacannnnnnnnnnnnnnnnnnnnnnnnnnnnnnnnnnnnnnnnntaatcagcaatcagtacggcaaccgntnnnnnnnnnnnnnnnnnnnnnnnnnnnnnnnnnnnnnnnttttctctggtcacaagaccgaannnnnnnnnnnnnnnnnnnnnnnnnnnnnnnnnnnnnnnnaaatattccaagtaattccaagtgtgatttttatcactgacnnnnnnnnntgtaagtgattgaattttggcggagagagggggatttgaacccccggtggagttgcccccactccggttttcgagaccggtccgttcagccgctccggcatctctccgttcagatggttgccatgatgccaggaaatttggcattttaacagtccctgtccgtgcaattttgttcaagtgacgagtttgcgagcaaaacgatgattaagtggccctggaaagtacaagaatcagcacatcaaactgcccttccctggcaggaagcactatcgatcccccttttaacgtgtctgacggaacaggaacaaagcaaattagtcactcttgccgaacgttttttacagcaaaagcggcttgttcctttacagggctttgaactggattcattaagaagctgccggatagcacttctattttgcctacccgttctggagttaggactggaatggctggatggttttcatgaagtcttaatttatcctgcgccatttgtggtcgatgatgaatgggaagacgatatcggtctggtgcataaccaacgtattgttcagtcaggtcagagctggcagcaagggcctatcgttttgaactggttggatatacaagattcttttgatgcttctggttttaacctgattattcatgaagtcgctcataagctggacacccgtaacggcgatcgcgccagcggagttccctttattccgttgcgtgaggttgctggctgggaacacgatcttcatgctgcaatgaacaacattcaggaagaaatcgaattggttggcgagaatgcggcgagcattgatgcttatgctgccagtgatcctgctgaatgttttgccgtactttctgaatatttctttagcgccccagaactttttgctcctcgtttcccttcattgtggcaacgtttctgccaattttatcaacaagatcctttgcagagactgcatcacgctaatgatacagactcgttttcggcgacgaatgttcattaattaacaactttgcagattaattaaccaattgaaatgacttatgaaatttagtgttgacagacaaggtaccgctaagtaatatgcgccccgttcacacgattcctctgtagttcagtcggtagaacggcggactgttaatccgtatgtcactggttcgagtccagtcagaggagccaaattctaaaaattcgcttttttagcgcaatgtcactgaccttagttgaacattgttttttaacggatagcgggtttttaacatcttaagcgccctcgacctttatggttgagggcgttttgctatgaacgccatcaccattttcccctcgattataaaacttgagttattcagtagtctcccctcttgcaactcacatccaaaactgcctaacgaaaagttattaattttcaatcatattgctatcaggatttacattttttcgctgtgctagaaagggcgcatttatgttagctcgttcagggaaggtaagcatggctacgaagaagagaagtggagaagaaataaatgaccgacaaatcttatgcgggatgggaattaaactacgccgcttaactgcgggtatctgcctgataactcaacttgtgttccctatggctgcggcagcacaaggtgtggtaaacgccgcaacccaacaaccagttcctgcacaaattgccattgcaaatgccaatacggtgccctacacccttggagcgctggaatcggcccaaagcgttgccgaacgtttcggtatttcggtggctgagttacgcaaactcaaccagtttcgtacgtttgctcgaggttttgataatgtccgccagggtgatgaactggatgtcccggcacaagttagtgaaaataatttaaccccgccaccgggtaatagcagtggcaaccttgagcaacagatagccagtacttcacagcaaatcgggtctctgctcgccgaggatatgaacagcgagcaagcggcaaatatggcgcgtggatgggcctcttctcaggcttcaggcgcaatgacagactggttaagccgcttcggtaccgcaagaatcacgctgggcgtggatgaagattttagcctgaagaactcccagttcgattttctccatccgtggtatgaaacgcctgataatctctttttcagtcagcatactctccatcgtactgacgagcgtacgcagattaacaacggcttgggttggcgtcatttcactcccacatggatgtcgggcatcaacttctttttcgaccacgatcttagccgttaccactcccgcgccggcattggcgcggagtactggcgcgactatctaaaattaagcagtaacggctatttgcgactgaccaactggcgcagcgcacctgaactggacaacgattatgaagcacgcccggccaatggctgggatgtacgcgcagaaggctggctacccgcctggccgcaccttggcggtaaactggtctatgaacagtattatggcgatgaagtggccctgttcgataaagatgatcggcaaagtaatcctcatgccataaccgctggacttaactatacccccttcccgctgatgaccttcagcgcggagcaacgctagggtaaacagggcgaaaatgacacccgttttgccgtcgattttacctggcaacctggaagcgcgatgcagaaacagcttgacccgaatgaagtcgatgcacggcgtagccttgcaggcagccgttttgatctggtggatcgcaacaacaacatcgttctggaatatcgcaaaaaagaactggttcgcctgaccctgacagaccccgtgacagggaagtcaggagaagtgaaatcactggtttcgtcgctacaaaccaaatatgccctgaaaggctataacgtcgaagccaccgctctggaagctgccggtggtaaagtggttacaacgggtaaagatattctggttaccctgccggcgtaccggttcaccagtacgccagaaaccgataacacctggccgattgaagtcaccgctgaagatgtcaaaggcaatttttcgaatcgtgaacagagcatggtagtcgttcaggctcctacgctaagccagaaagattcctcggtatcgttaagtagccagacgttgagcgcggattcccattcaaccgccacactgacttttattgcgcatgatgcagcaggtaatcctgttatcgggctggtgctctcgacgcgtcacgaaggtgttcaggacatcaccctttctgactggaaagataatggtgacggaagctatacccagatcctgaccacaggagcgatgtctggcacgctgacgctgatgccacagctgaacggtgtggatgcggctaaagcccccgccgtggtgaatatcatttctgtttcgtcatcccggactcactcgtcaattaagattgataaggaccgttatctctccgggaatcctatcgaggtgacggtagaactgagagatgaaaatgacaaacctgttaaggagcaaaaacagcaactgaataccgcagtcagcatcgacaacgtgaaacctggtgtcactacagactggaaagaaaccgcagatggcgtctataaggcaacctataccgcctataccaaaggcagtgggcttactgcgaagctgttaatgcaaaactggaatgaagatttgcataccgctggatttatcatcgacgccaacccgcagtcagcgaaaattgcgacattatctgccagcaataatggtgtgctcgccaatgagaatgcagcaaacaccgtctcggtcaatgtcgctgatgaaggaagcaacccaatcaatgatcataccgtcacgtttgcggtattaagcggatcggcaacttcctttaacaatcaaaacaccgcaaaaacggatgttaatggtctggcgacttttgatctgaaaagtagtaagcaggaagacaacacggttgaagtcacccttgaaaatggcgtgaaacaaacgttaatcgtcagttttgtcggcgactcgagtaccgcgcaggttgatctgcagaagtcgaaaaatgaagtggtcgctgacggcaatgacagtgccacaatgaccgcgacagttcgggatgcaaaaggcaacctgctcaatgacgtcaaggtcaccttcaatgtcaattcagcagcagcgaaactgagccaaaccgaagtgaatagccacgacgggatcgccacagctacgctgaccagtttgaaaaatggtgattatacggttacggcctctgtgagctctggttctcaggctaatcaacaggtgatttttatcggtgatcaaagtactgctgccctgaccctcagtgtgccttcaggtgatatcaccgtcaccaacacagctccgctacatatgactgcaaccttgcaggataaaaatggcaatccactaaaagataaagaaatcaccttctctgtgccaaacgacgtcgcaagtcggttctcgattagcaacagcggaaaaggcatgacggatagcaacgggactgcaatcgcctccctgaccggcacgttagcgggcacgcatatgatcacggctcgtctggctaacagcaatgtcagcgatacacagccaatgacgtttgtggcggataaagacagagcggttgtcgttctgcaaacatcgaaagcggaaatcattgggaatggcgtggatgagacgactctgacagcaacagttaaagatccttttgataacgtggttaaaaatctttcagtagtcttccgcacctcccccgcagacacgcaactgagtctgaacgcgcgtaatactaatgagaacggtattgccgaagttacccttaagggcacggttttgggtgttcatacagccgaagccatactgcttaacggcaacagagatacgaaaatcgtcaatattgcgcccgatgccagcaacgcgcaggtcaccctgaacatccctgcacaacaggtggtgacgaataacagtgacagcgtgcagctgacggcgacggtgaaagacccgtcgaatcatccggtggcgggaataacggtgaacttcaccatgccacaggacgtggcggcaaactttacccttgaaaataacggtattgccatcactcaggccaatggcgaagcgcatgtcaccctcaaaggnaaaaaagcgggnacgcatactgtgaccgcaacgctgggtaacaataatgccagcgatgcgcaaccagtcaccttcgtggcggataaggacagcgcggttgtcgttctgcaaacatcgaaagcggaaatcattgggaatggcgtggatgagacgactctgacggcaacagtgaaagatccttttgataacgcagtaaaagatctacaggtcaccttcagtaccaaccccgcagatactcaacttagtcagagcaaaagcaatactaacgacagtggtgtggccgaagttacctttaagggcacggttttgggtgttcatacagccgaagccacactgcctaacggcaacaacgatacgaagatagtcaatattgcgcccgatgccagcaacgcgcaggttacgctgaacatccctgctcaacaggtggtgacgaataacagcgacagcgtgcagctgacggcgacggtgaaagatccgtcgaatcatccggtggcgggaataacggtgaacttcaccatgccacaggacgtggcggcaaactttaccctcgaaaataacggtattgccatcacccaggccaatggggaagcgcatgtcacgctcaaaggtaaaaaagcgggtacgcatacggttaccgcaacgctgagtaataacaataccagtgattcacagccggtaacgtttgtggcggacaaaacctcggctctggttgttcttcagatatcaaaaaatgagatcacaggtaatggcgtcgatagcgcaacgctaactgcaacggtcaaagatcagttcgacaatgaggtgaacaatcttccggtaacattcagcacagcttcttcaggcctcaccctgaccccaggggaaagtaataccaatgagtctggcatcgcgcaggccactctcgcaggcgttgcctttggtgagcagacggtcactgcatcactggctaataatggtgccagcgacaacaaaactgtgcattttattggcgacacagcggcggcaaaaattatcgagttgacgcctgtcccagacagcataatcgcaggtaccccgcagaacagctccggcagcgtcatcaccgccacagtcgttgataataatggctttccggtgaaaggtgtgactgtgaacttcaccagcaacgcagcgacagccgaaatgacnaatggcggtcaagccgtgacnaacgaacagggtnaggctaccgtcacttataccaatacccgctcctcgatagaatcaggagcgagaccggataccgttgaggccagtctggaaaatggtagctccacgcttagcacatcaattaatgtcaacgctgatgcgtctacggcacatctcaccttgctacaggcactttttgatacagtctccgcaggcgacactaccaatctgtatattgaggtgaaggataattacggcaacggagtaccccagcaggaggtaaccctcagcgtttcaccaagtgaaggtgtgacccccagtaataacgctatatatacgaccaatcacgacggcaatttttacgcaagctttaccgctncaaaagccggggtataccaagtgacggcnaccctcgaaaatngcgattcgatgcaacaaacagtgacctatgtgccgaacgtagcgaatgctgaaatctcgctggcagcctcgaaggatccggtaattgccaacaataacgatctcacgacactaacagcaacagtcgctgatacagagggcaatgcgatagccaacagtgaggtaacatttactctgccggaagatgtgagggcgaacttcacgctgggcgatggcggtaaagtggttactgatactgaaggcaaagcgaaagtcacgctgaaaggtacaaaagcaggcgctcatactgttacagcatcgatggctggcggtaagagtgagcagttggtggtgaactttattgcggatacactcactgcgcaggttaatcttaacgttaccgaggacaattttatcgctaataacgtcgggatgaccaggctgcaggcaacagtgactgatggaaacggcaacccgttagccaatgaggcggtgacattcacgctaccggcagatgtgagcgcaagctttactctcggacaaggcggttccgccattactgacatcaacggcaaggctgaagttacactgagcggtacaaaatccggcacctaccccgtgacagttagcgtgaacaattatggtgtcagtgatacgaaacaggtgactttgattgccgatgctggtaccgcaaaactagcctccttaacctctgtatactcattcgtcgtcagcacgaccgagggcgcgaccatgactgcaagcgtcactgacgctaacggcaacccggtagaaggtataaaagttaatttccnnnnaacttccgtcacgctaagcagcaccagcgttgaaacggatgatcggggtttcgctgaaattcttgtgacaagcaccgaggtcggactgaaaacagtttcagcctctctggcagataaacctactgaagtcatctcgcgattactgaatgcaaaagcagatattaattctgcaacgattaccagtctggagatacctgaaggtcaggtcatggtcgcacaagacgtagcagttaaagctcacgtcaacgaccagtttggcaatccgattcttaatgaatctgtaacattcagtgcagaaccaccagagcacatgaccatcagccaaaatattgtctctactgatacgcatggtatagccgaggtcactatgacgcccgaaagaaacggttcgtatatggtgaaagcatccctggcgaatggatcntcttatgagaaggatctggtggtaatcgatcaaaaactgacactctcggcgtccagcccgcttatcggtgtcaattccccaacaggtgcaactctgacggcaacgctaacttctgcaaatggcactccagtggagggtcaggtcatcaactttagcgtaacgccagaaggtgcgacgttaagtggcggaaaagtgagaaccaactcttcaggtcaggctccagtcgttctgaccagcaataaagtcggtacatatacggtgactgcatcgttccataacggcgtaacaatacagacacagacaatcgtgaaagtcactggcaactcaagcaccgcccatgttgctagctttatcgctgatccatcgactatagccgccaccaacagtgatttaagtaccttaaaggcaacggttgaggatggcagtggtaacctgatcgaaggtctcactgtgtacttcgccttaaaaagcggctctgccacattaacgtcattaacagcggtgacagatcaaaacggaatcgcgacaacaagcgtgagaggagcgataacggggagcgtcacggtaagcgcagtcacgaccgctggtggaatgcaaacagtagatataacgctggtggcaggcccggcagacgcctcgcagtccgtccttaagaacaatcggtcatcattgaaaggagactttaccgatagtgctgagctacatcttgttctgcacgatatatcaggcaatccgatcaaagtttctgaagggctggaatttgtgcagtcaggtaccaacgcgccctatgtgcaagttagtgcaattgactacagtaaaaatttctcaggcgagtacaaagccactgttacaggcggcggagagggtatcgcaacgctgatccctgtattgaatggtgttcatcaagcgggtctgagtaccacaatacaattcactcgcgcagaagacaaaataatgagcggtacagtgttagtcaatggtgctaacctaccgacaactacattcccttcgcaggggttcactggggcgtattatcagttgaataatgacaactttgccccaggaaaaacggcggctgattatgagttttcaagctctgcctcctgggttgatgttgatgctaccggtaaagtgacatttaaaaatgtcggcagcaaatgggagaggattacggcgacgccaaaaacaggcggccctagctatatatacgaaatccgagtgaagagttggtgggtgaacgccggcgatgctttcatgatatacagccttgctgaaaatttttgcagtagcaatggctacacacttccccttggagaccatttaaaccatagtcgttcccgaggcatcgggtcactgtacagtgaatggggagatatggggcattacacgactgaagctggttttcattcaaatatgtattggtcatcgagtcccgcaaactcaaacgaacaatacgtagtttccctggcaacaggtgatcaaagcgtatttgaaaagcttgggtttgcttatgcgacatgttataaaaacctctgattttccgttataatttcttaaagagtgctccattcggggcactcttttttacattccctctatagagcttgcccttctctcacagaaaatgaataaataaaaatgcgataccgcaagaatcgcgttcgatgtgactatgatcgtatccggtgagtacagcttttatccaaaggctggttttctgtgatgattgaccagcctcagagtattgatgacaccaccgttcataacagatcggcattactatgcataagtactgtctcatattctcgccaaaacactttttaatgcctttgcgaattcatccagacttatattgtcaattttttgcccancgacgactgactccgaaacatcggccattgcgggccatcgcgttttgtaatcagcataaattgcaacaacgggggtattataggcacttgccatatgtaatattgaggtgtcaggagttattgcgatataagcatcttttatgattgctgctgaacgtttaatcgagggtgataaggataaacggtagacattattataacaatccactaataccctggctttatcttccccttttggtccatgaacgatcactattggtatatctgtttcactttgaattttttctattagattttctgcaatcgatagtgaaaatgtacgatcctgcgagctaccttctaaattaagcgcaatgtaagatcctaacgatcgcatttcctcgcgcacctcatcgagtacatcctcacttagtggcaattcatatattggcctgactgctggaaaacccgcctcacgcatcataaatgcccatgtcatgggtacgggagcccggagtttctgatccatccgggacgcgttcttacacacaggggaatagcacttcatggttaaaccaacaacctgaaaattcgtttttgctttcaactgactgataaataacatcgttttcaggttctttttacgcatcgcctctatacaaagatccggcgtaccgtattgctgtgttatgttcttcgctaaatcttttatttcttttaatgttgcgtgatcctgcatagtcattgtgactaatgttaatttagtctgttcaagtttgagcgcattaaagacttctaaattaattgtcgacgtaacaattaatagatgcttaattttatgcaattcaagcgcccgaataacaggaaagatggccatagcatcgccaatctgatcgggaatatggatgacaacaaagtctgttttttcaatattgnnnnnntaagctttataatcgtagtaactaaatgcaatacgtctcaacaatgatactaaaaacataactaacctcgcctccctactggttataatgcaatgcagtctatcagaatcatcagggtgcaattttgtgcatatgcggacttttatgtttcatatctcgaacctgtggggcctctgcttaatccttaaacaacaccagcaactcctgcgctttcatcttccagcgaatttttcatgttgccgttaatcagccataaaatcatttgcagatgcgctctgtcgaggtagtctcataaggttcgtttatagatcgacgcaatgtgagttaccttttccatactaattataaaaagacagtacaaacaggatcattatggactccacgctcatctccactcgtcccgatgaaaggacggtttcgttaagtcgcgcccgacgagctgcgttaggcagtttcgctggtgccgtcgtcgactggtatgattttttactctatggcattaccgccgcactggtgtttaatcgcgagtttttcccgcaagtaagcccggctatgggaacgctcgccgcatttgccacctttggcgtcggattccttttccgtccgctcggcggtgtcattttcggtcactttggcgaccgactgggacgtaagcgcatgttaatgctgaccgtctggatgatgggcatcgcgacagccttgattggtattcttccttcattctcgaccattgggtggtgggcacctattttactggtgacgctgcgtgccattcagggatttgccgtcggcggcgaatggggaggcgcggcgttgctttccgttgaaagtgcaccgaaaaataaaaaagccttttacagtagcggtgtacaagttggctacggtgtaggtttactgctttcaaccggactggtttcattgatcagtatgatgacgactgacgaacagtttttaagctggggctggcgcattcctttcctgtttagcatcgtactggtactgggagcattgtgggtgcgcaatggcatggaagagtccgcggaatttgaacaacagcaatataatcaagcggnngcgaaaaaacgcatcccggttatcgaagcgctgttacgacatcccggtgctttcctgaagattattgcgctacgactgtgcgagttgctgacaatgtacatcgttaccgcctttgcacttaattattcaactcagaatatggggttaccgcgcgaacttttccttaatattggtttgctggtaggtggattaagctgcctgacaattccctgttttgcctggcntgccgatcgttttggtcgccgcagggtttatatcacaggcgcgttgatcggaacgttgagcgcatttcctttctttatggcgcttgaagcacaatctattttctggatagttttcttctccataatgctggcaaacattgcgcatgacatggtggtgtgtgtgcaacaaccgatgtttaccgaaatgtttggtgccagttatcgctatagtggtgctggagtcggttatcaggttgccagtgtggttgncggtggatttacaccttttattgccgctgcgctcatcacttactttgccgggaactggcatagcgtcgccatttatttgctggctggatgtctgatttccgcaatgaccgctttgttgatgaaagacaatcaacgcgcttgatagtctggcgaagatcatccgatcttcgccttacacttttgtttcacattcctgtgacatactatcggatgtgcggtaattgtatggaacaggagacacacatgaataataagggctccggtctgaccccagctcaggcactggataaactcgacgcgctgtatgagcaatctgtagtcgcattacgcaacgccattggcaactatattacaagtggcgaattacctgatgaaaacgcccgcaaacaaggtctttttgtctatccatctctgaccgtaacctgggacggtagcacaacaaatccccccaaaacgcgcgcatttggtcgttttactcacgcaggcagctacaccaccacgattactcgccctactctctttcgttcgtatcttaatgaacaacttacgttgctgtatcaggattatggcgcgcatatctcggtgcaaccctcgcagcatgaaatcccttatccttatgtcatcgatggctctgaattgacacttgatcgctcaatgagcgctgggttaactcgctatttcccgacaacagaactggcgcaaattggcgatgaaactgcagacggcatttatcatccaactgaattctccccgctatcgcattttgatgcgcgccgcgtcgatttttccctcgcgcggttgcgccattataccggtacgccagttgaacattttcagccgttcgtcttgtttaccaactacacacgttatgtggatgaattcgttcgttggggatgcagccagatcctcgatcctgatagtccctacattgccctttcttgtgctggcgggaactggatcaccgccgaaaccgaagcgccagaagaagccatttccgaccttgcatggaaaaaacaccagatgccagcatggcatttaattaccgccgatggtcagggtattactctggtgaatattggcgtgggaccgtcaaatgctaaaaccatctgcgatcatctggcagtgctacgcccggatgtctggttgatgattggtcactgtggcggattacgtgaaagtcaggccattggcgattatgtacttgcacacgcttatttacgcgatgaccacgttcttgatgcggttctgccacccgatattcctattccgagcattgctgaagtgcaacgtgcgctttatgacgccaccaagctggtgagcggcaggcccggtgaggaagtcaaacagcggctacgtactggtactgtggtaaccacagatgacaggaactgggaattacgttactcagcttctgcacttcgttttaacttaagccgggccgtagcaattgatatggaaagtgcaaccattgccgcgcaaggatatcgtttccgcgtgccatacgggacactactgtgtgtttcagataaaccgttgcatggcgagattaaacttcccggtcaggctaaccgtttttatgaaggcgctatttccgaacacctacaaattggcattcgggcgatcgatttgctgcgcgcagaaggcgaccgactgcattcacgtaaattacgaacctttaatgagccgccgttccgataataagttctgaaccttcttatcaaaaatagatgtgaaggattaagtaagacatctggcaaatagcccgcaataaacgcgggctgtttgcttccttgggcggatacgagttttattatcgtcttaatgatttccacatattaaaagcaagtatgctttcaaaacacaattataaaaaatcccgccaacaatatnngtnnntataaaattaaatataagattatggctttagaatatttttatttctaatagacgagatttttcctgttatgatataatatgccgaattaacacatgttaacgatttaccagtaatgtaaataaattttcgaggagatcattccagtgggacgtaaatgggccaatannnntgctaaaaaaacggctaaagacggtgcaacgtctaaaatnnntgcaaaattcggtgtagaaatctatgctgccgctaaacaaggtgaacccgatccagaattaaacacatctttaaaattcgttattgaacgtgcaaagcaggcacaagttccaaagcacgttattgataaagcaattgataaagccaaaggcggcggagatgaaacattcgtgcagggccgttatgaaggctttggtcctaatggctcaatgattatcgccgagacattgacttcaaatgttaaccgtacgattgctaacgttcgcacaattttcaanaaaaaaggcggcaatatcggagcggcaggttctgtcagctatatgtttgacaatactggtgtgattgtatttaaaggatcagaccctgaccatatttttgaaattttacttgaagctgaagttgatgttcgtgatgtgactgaagaagaaggtaacattgttatttataccgaacctactgaccttcataaaggaatcgcggctctaaaagcagctggaatcagtgagttctcaacaacagaattagaaatgattgctcaatctgaagttgagctttcaccagaagatttagaaatctttgaagggcttgttgatgcccttgaagatgacgacgatgtacaaaaagtttatcataacgtcgcaaatctctaattatattttaaagaaatctgtctttacggcagatttctttaatctcatataatccttataaaaaatataatgttcaactcgtcatattgcttataaaaaatccccgttcccggagaaataatatttattaaaattccaggtcttctttttctgattaccgaagacaaagtggcaattacgtatagtttcccgataaagacgcgacagcgacatcccgcataaggcattttttctttatctttgtacggtacttcatggaacagagtttttgaccttgcgaatcgtgatgtctgttgggggcaatttactcactgaagcgtgagactcgattaagcgcacgaaacacagaaatcaaaaaaaccggtcactttttacaaggcaaccgggtaaaaataatttttattttttaactgccctgagactcataaagatgcctcaaaactaaaatttggctcctctgactggactcgaaccagtgacatacggattaacagtccgccgttctaccgactgaactacagaggaatcgtgagaacgaggcgaatattagcgatgcccacccacaatgtcaaagcctgttttttaaatttgaaatcgtttgctgaaataatctgcattttgtcgtttattccgacacagctggctttttttcacacttttgcggttcgggtcgagggtatttccacagccaacgtccagtaaccattcgccagtaaaacagcacggcccgcacagcccagtcggcaaacattcccatccagacaccaaccacaccccagccaagcatgatgcccagcacataaccgacgacaacccgacaacctcacatgctcaacatagaaacccacatagcgtaacgggcgtcacgagcccccttaaatccagcgggtagcacccatgaagcggaccaaataggcataaataaagcatttagccaaatcagaatcacaacgacatgtttaacctgtggatcctgggtgtaaaacgatgccataaccccggcaaagggagccgttagccaggcgatggccgttaatccaagagtggacagccaaaacacatgccgcaactgaatctctgcttgcgctatctgccctacccccaaccttcggcctgtaatgatcgtagaagcagaaccgagcgcacttccgggtaagttgataagagccgcaattgaaaacgcgataaaatttccggcaataacactggtccccattccggcaacgaacatttgggttaataaccgaccactggtaaataacactgattcgacactcgctggaataccaatccccatgacttcccagataatgctaaaattcagcggtttaaaatagctctttaacgaaatccttagcgcaggattaaaaccaatcgccagcacccacaaaattgcaactgcgccaatataacgagaaatggttaaacccaacccagccccgacaaatcccagtcccggccaggagaaaaggccgtaaatcaatatgccgctaataataatattaagaatattcaggctaccgttaatcagtagcggtattttcgtattccctgcaccacgaagtgccccgctaccaattagagtgatggcagctgctggataactgagtaccgtcagctccagataagtcaacgccagtgctttaacttctgtcgtggcatcacccgcgacgaaatcaatantttgctcgccaaaatgatgaataagcgttgccaacagtacggcaaacaacgtcatgatcaccaatgactgccgcgtcgccaccctcgctcgtcgtcgatcccgcttaccgagactaaatgccacaacgacagtagtaccaagatcgatagcagcaaaaaaagccataatgaccatattgaagctgtccgccaatcccacgccggccatcgcatcttttcccagccagctgaccagaaaagtgctcagaacccccatcaacaggacacaggcattctccatgaagataggaacagcaagcggggttatctcgcgccagaacaacactttgtagctcttgcgtttagcgtgccagcgagtgccgtgaacaacctggcgtaaagcagaggagatattcaaagccgaccttaattgcagaaagtgaaaccacatttcaaataatgagggagaatcagcaaannnnnnnnnnttttcgccatcaaattgtctgcaaatgcaacaaactgttgatagaaacggcaaacagttgggaaaattaaaaatcgggtttgacaaaagatttttcgccgttaagatgtgcctcaacagcgattcctctgtagttcagtcggtagaacggcggactgttaatccgtatgtcactggttcgagtccagtcagaggagccaaatttctgaaaagcccnnnnnnnnagcgggctttttgctatatctgataatcaatttcctcttcactgttttccatcacctgccgcttgatatcctcaactgaaagtcctgcattgcaaagttccagaaagcgccagacatagttacgctgaagttgtcctcgcttcagtcccaaccagacagtattagcatcgaaaagatgccgcgtatccaggcggattaaattcttttcctcttgttcaccgctggattgttcggcaactaatccgatcccaagcccaagagcaacataggttttaatgacatcagaatcctgcgcacttaatataatatctgccagcaaacctttgcgggcaaatgcgtcatcaatacgtgagcgccccgtaatcccctgtcggtaagtgattaacggccacttcgctattgattccagcgtcaatggtgtaatttgcgtcaagggatgatcgtgtggaacaagcaaactatggtgccaacgaaaccacgggaaggcgacgagctgcgggtcattactcaaacgctcgctggcgataccaatatcagcttcaccattatgcaacaacgtcgcaatttcctgtggcgtcccctggattagctcgagccgaacctccgggaaaagttcgcgaaaagctttaatgacctctggcaagctataacgtgcctgagtatgcgtcgttgcaatagtgagaacgccagacgtatcgttggtaaacaggtctgcaagccgacgaacattactggcttcattgagaatacgttctgcaatgaccagtaatgctttgcccggttcagtcatgcccagcagtcgcttacctcgtcgaacaaatatttcgatgccaagttcatcctccagttcccgaatatgacggctgacgcctgactgtgaggtaaaaagcatattcgcaacctctgtcaggttgtaatcctgacgtgcagcttcgcggattatctttagttgttggaaattcacggtaaactccgggcagttcagatatcccgttattgttaaagtctaacgcccggcataacaaataataaaaacccgcatcttattccatcccgatataacgcttagctcaccaattgccactgccttttttccatcactggagaactaatcactgacattaacaactctttcactgcctgtgcctgtggcgataagttcgctctggcgggtaaatttaatgacaaagagagactcatggaaggcgtggtaatgcgtgacatccacccatttactgcgccacataacgaacgcgcggccgattcgggtaatactgcaactcccatgccgctggcaatcgctgcggtaagcgtagcaatagactcaatttcaccaatgacttttgccgtgagccgccgtagggaaaacgcctcatcaacacgaagtctaacagcgctgtaatcactggggagaaaaaggttcatttgtgcaatagcattaacatcaacgctttgccccgggcaatcttgagttcctaccaggaaaagatcttctttcagcaaagcctgactggatacaccagccacaggggaatgctcataaatcaccgccatatcgagttggtgatttatcagtttttcgttaagcactgcaccgctattttcatgaagatagataacgacctccgggaattcagcgcgaaccgcctgtaataagggcatggtgatggatgacgcagcggttcctggcgcaaagccaatcgagacttgccccgataatgcctgaccaacgttatgcaccgccagttgggcctgctcacactgacgtaaaatggcccncgcatgggtatagagaatttttccggcgtctgttggcgtaacgccccgttttgtgcgaatcaaaagttgttgatttaactcaccttcgagtgtggcaacctgctggctgagcgctggttgtgcgatatgcaatacttcagcagcctgagtcaggctaccaatatctacaatttttacgaagtatttcaggcgtctgaagttcatgttgcctccggtttttgagaatcggcccaagtgccgccattacttacaaccagattgcaagatgcttgccagttttattttggcgttgatgtacaagctaaccaactgtcaaataagagattatgatagattcgtcattggctcttttcaccagcagtcgcgttcccctgccctataaaaggagggtatgcaccacgatggttcattaccaataagattgaaatctcatcactttgttgaaattgacagcaaacaaacaaaaaaatgcatttcancctttgacatcaccatgcactgccattaatatgcgccccgttcacacgattcctctgtagttcagtcggtagaanggcggactgttaatccgtatgtcactggttcgagtccagtcagaggagccaaattcaaaaaagcctgctttctagcaggctttttgctttctaattaccaacgctcttaaaacatctgtcttgaaccagaactaatttgcacaggcattcccgatcgacgttgcaacgcagcatttgcgcgattcacatcaacttcttgcccgttgataaacgcccgcaaagatggggttaccggcaatggcacttttcggtcagactcatattcagcacgattgcgcgacagcggctcatgaacttccagccactttgaaccatccggttccgttgtgtatttcactggctgatcaataatttgcacacgagtacctacaggaacattatcaaacagatatttgatatcgtcattgcgcagacgaatacagccctgacttacccggagcccaataccaaaattggcattggtaccgtggatggcatatagcctgccaatataaatcgcgtacagccccatgggattatcgggccccgcaggaacaaatgcgggcaaactctcccctcgtttcgcatattcncnnngggtgttcggcgttggcgtccaggttggtgcttcttgtttacgttcaacggtagtcacccagttacgcggggtttctcgcccagcctggccgataccaataggaaagacttccacagtattactgtctggtgggtagtaataaagacgcatctcagcgacgttaaccacaatccctttacgaacagtggcgggcaaaatcagttgctgcggaatggtgagttgcgaacctgacttcggtaagaagacatcagcgcccggattcgcttccagcatgttacttaacccttgcccgtattgtgcggcaaaagtctccagcggctgggtattgtgatcaggaacagttacagtaagcgactgccccactaaacggctaccctctggaggtaatggataagttaccgccaggctagtatggctggcaaaaagcagagcaaatgagcaaagaatatttacacgacgcatcatgtccctttcctaagtcgcgaaagctatcggttaagtatagcttttatcagacttttcgtttttaactgttcaaatcagaagtcgtattccccggtagaacaattttactggcagcaagttcgcccatgttgttgtatatcgcacaagcagcttcgatgatgggcatcgccagagctgcgccactcccctcacctaaacgcatatccatattgagaaaaggctccagccccaaatgcgacagcgctatacgcgcccctttttctgccgacaggtgagaaggaatgagatacggtttgattgcaggagacatctggcaggctgcgagcgcagcagcataagaaagaaatccatccagcaacacgggtaaaccgcaggaagcagcgcctaacatcacgccagccattccgaccaaatcaaatccacccacttttgccagaacattaacgccatcctgcggatttggctgattcaacgtaatcgcccggcgcacaacatcaattttattagccagtttatctgtcggcaggtttgcgccaatcccaaccacttcttcaggatcccggccagtgattgtgctgactattgctgctgccggtgtcgtgtttgccatccccagttcacctacaccaaacagcgtgacaccgttttttgccagctcccgcgtataacatatgacgtccaaaagtaacttttcagcctgacggcgactcattgccggagctgaagcaatattgccgctacntcgtgcgacacgcatgttgataagcccggggataggctcagcagtatcaataccaacatcaattacgtggacgttagcgcccgcttgtgctgccagcacacacacgccggttgttccgcgggtcatattttcagcctgaatggctgtcacttcttttggggaaatagcgacccnttcntcccagacgccgtgatcggcacacataaccagtaccgcttttttgcccacatgcggtatgccattcaaccccggcattcccgccagttgtacgccaagcgcctccagccttcccaggctaccaacaggtttgagtaacccgtcaatatgccgttgtgcacgcgacatagcggcaggatcgatggcagggatcgtattcagtaaattggcaagtgtttgcatgtcacgtctctttatagcagtgccagcaggaagaccagttcaccaagctctatggctgctcccagcgtatcgccggtttgcccgcccagcgtacgtttgagaagctgaccgaggatgaaaatcgccaccatcgtcaccaccatagcagccacaccatgcatacccggcaataatacggcagcaaaantagcggctaagccgagtgtgacgcaggtttgtcgcccatcaattttgccaatgaacacattgccaagcccttcttcccgggcataacgatgacgatacatcaataatgcggcagtcccgcggctgaccgcacatgctgccgccagcgatgcaaggatcggttcgccacgcagagccaactcgcttaacaccaaaatctttgccagtacaacaaaaatcaatgccagaccgccgtgggtacctaaacggctatcacgcatgatttccaacatgcgatcgcggctacgtgcagaaaatacgccatcacaggtatcagcgaggccgtccagatggaatcccccggtcatcagcaccagcacaagtacgctaaacagtgccgccagtggtgcgccacaccatgcctgcagcaccatgaagaccagcccgctaatcgcgccaagcaataatccaatcaaaggaaaagtaataataccgcgagaataatgctcgaaatccagtccctgggaccagcgacgcggtacaggcagacgcgtaataaatgagagcatcgcccaaaataatttactcatttgatttttactccaatacccgaaaccaccagccatacttcatttgccgcagcggccaactgctgatttacccgcccggcaatatcacgaaaatgtcgtgccagacgactctccggcacaatccccattcccacttcgttagtcactaatacaacctttgcggggcaacgttggcaggcagcaatcaacgactgaatctcagcattaatcgcctgttccatcgcctgataatcccattcatcagggtctttatcgccgccataatcaaacaacagattagtcaccattgtggtaacgcattcaagcaacacaacctcattcgggttaatgtctgcatgaattaattcatcaagatgttgccagcgctccactgtgcgccagtgctccgggcggccttgccgatgatgttctatccgtgcagccatctcatcatcaaggatttgcgaggtagcgatatacagaacctgtgaagagtccccaataagcgcctctgcgtggcgactcttcccgctccgtgcaccccccgtcaccaaaatcatcataccgactcctgattcaaatgtatgatggtattcattgaacagaacaatggatcccccaccgttgctgaccgcaaaacatttacgcgattaatactgcgcgtaatataattaaaaatccagcattctcaatccattacgaaataagatggcattacggaatagccagactttctcgtgttaacgtccgacaaaatgcgtcattgacagcggtttctgtggattgacacatttcattcagataatgaattaatgctactgccggaacaaccagcaaacgggcattgtgttctgaaatccaggctattgattcaacgtcagcgacagatctgcgctgtaaaagaacttgtaaaacaacgtaatagaattatccggaatggtggcgactatgcactagaacaccacaatttcgctctctcggtaaggcactgtcacagcattcaacagaatgtgacttgccagatttattagcgccaccagatgtttaaccgggtaaccacgacccagtcggggatatattccatcttctcgctgacatcatcaagaataaaaaggtttatcacactcagagcaacgttcttcagcaggcgggataattcttcaacatttagaagatgtgttattaaaggcatacaaactggacgtattgtattttcttttggtggttgacctaaggtagcagtttatcctgatgcgctgagatttctgtaatatctacgtcaacattctcctcgaatagaaaatgcagccccggcaagtaattcacattttttaataaaacgttgttagcgtgccattttcagaatctctccaagaaagcgaattcttttctcaaattctgcattctcagacacagctttctactccatggtaatggcccaaatacgaagttgctcaggatcattagtggtgctgagaagttaaataaccatgcggagtaccactcgtcatcacgtatttatatatcatgaagctattgttgtgttttgtacatcagtagatatattctgatatactccttttgctagacataacctttcacctgcttgcaaagcttctgtgttctgacattgccaaattgttgcaattctgtatccagccttctttcagtcatagcttcgggccgcgataagactcactgatctgaccctgattcctcttgcagactttatagaccaattaaaatgcagtttctgcaggtcaacgtctgaccatcattgtcatcactctggccattagagtaaccttctgcattcatccttttgtaaaaagtttatattagtatcagcaattaaccggacctgatactgatatgagtcttaccgcatatacggtcaatttcagcaattaattacattatccacgccaaagtatttgtcatcacaatgatggtaccttctttcagacaccattttttcaactccgttttccacggaccgcactcttatgtcaagagtgcggtccgtgggatacaaccagagaccgactgacacgagtcagaggaaacgacggatatgttcagtcgtaaaatatctatcaaaaaacatgattaaggtcaaaaatgtttgatatttacaatttatgaagatgacaataatcatagatatatgagaacataaatgaaaataattatcattacagcaatcatttgtactttgtattaatgagggatgaaatgttatataatataccttgtcgaatttatatcctttccactctgtcattatgcatttctgggatagtttctactgcaaccgcaacttcttcagaaacaaaaatcagcaacgaagagacgctcgtcgtgaccacgaatcgttcggcaagcaacctttgggaaaccccggcgactatacaggttattgaccaacaaacattgcagaactccaccaatgcctccatagccgataatttgcaggacatccccggagtagagataacagacaactccttggcaggccgtaaacaaatccgcattcgtggcgaagcatcctcccgtgttttaattctcattgatggtcaggaggtaacttatcagcgcgccggagataattatggtgtgggactgttgatagatgagtctgcgctggagcgtgttgaggtagtgaaaggtccatattccgtactgtacggttcacaggcaattggcggtattgttaacttcatcaccaaaaagggaggtgacaaacttgcatctggagttgtgaaagctgtttataattccgcaacagcaggctgggaagaatcaatcgcggtccaggggagcatcggtggatttgattatcgcatcaacggtagttattctgatcagggcaatcgtgatacgccggatggacgtctgccgaataccaactatcgtaacaatagtcagggtgtatggttgggttataactccggaaaccatcgttttggcctctcgcttgatcgctacagactcgcgacacaaacttactatgaggatccagacggaagttatgaggcatttagtgtcaaaatacctaaacttgaacgagagaaagttggggtattctatgacacagacgtggacggtgactatctaanaaaaattcatttcgacgcgtatgagcagaccatccagcgccaatttgccaacgaagtaaaaacgacacagcctgttcccagtccgatgattcaggctctgaccgttcataacaagactgacacccatgataagcaatacactcaggcggtcacattgcagagtcacttttcgctgcctgctaataatgaacttgttaccggtgcacagtacaaacaagacagggtcagccaaaggtccggtggcatgacctcaagcaaatctctgaccggcttcattaataaggaaacacgaactcgctcctattatgagtcagagcaaagtacagtctcactattcgcacaaaatgactggcaattcgccgatcactggacatggacaatgggagttcgccaatactggctttcttcaaagttgacgcgtggtgacggagtatcatataccgcaggcattataagcgatacctctcttgccagagagtctgcgagtgatcacgaaatggtaacatctacaagcctgcgctattcaggtttcgataacctggagttacgcgctgcgttcgcgcaaggctacgtatttcccacactctcccagctttttatgcagacatctgcgggcggcagtgtcacatacggaaatcctgatcttaaggctgaacactccaataactttgaattaggtgcacgatataatggtaatcagtggctgattgacagcgcagtttactactcagaagctaaagattatattgcaagtctgatctgtgatggcagtatagtttgcaatggtaacaccaactcctcccgtagtagcnnnnattattatgacaatattgatcgggcaaaaacatggggactggaaataagcgcggaatataatggctgggttttctcgccatatatcagtggnnnnttaattcgtcggcaatatgaaacttcaacattaaaaacaactaatacaggtgaaccagcgataaacggacgtatagggctgaaacatactcttgtgatgggtcaggccaacataatctctgatgtttttattcgtgctgcctctagtgcaaaagatgacagtaacggtaccgaaacaaatgttccgggctgggccactctcaactttgcagtaaatacagaattcggtaacgaggatcagtaccggattaacctggcactcaataacctgacagacaaacgctaccgtacagcacatnaaactattcctgcagcaggttttaatgcagctataggttttgtatggaatttctgatgacaaaaacaatcgttatggaattctttgtcctgatctgcccgctttgcgggcaggctaacgaacgtattgtgtttgttgaaggtttttcgacgttgttttccatctgtgggtgaatatttattcttcccgccagcatgactctatactcattgctacgacaatgacttataaagctggttactgaacctatacctttgtaattcaaaagtgatatcagttcacaacgcaatactatttttagattatttactctcacccagatactgaatcaatggataataccttttgatttatcccgacgcggaagaaggtggaataaatattctccttctattgccccctactccaactatcatattttacaatatcaacgaaccgtccatgccgggctgaaattctcttcctgaaacagctctgtcagcccgctaatctgtttcagcctcagcacttcatcctggtccatgcccaactctgtgccaatacgctcatctgtccagcccagacgcgaaaggtccctgacaatgtcagacattgacgttatctggtgttttcccctggcacggttatgccgtatggtcgcggcaatacgtgatgcctgtccctttctctctggattaatacaggccactggcagccagcccttcagacgttttctcgtatccgctttcctgcccagcaactgacgatgaaaaccatccacgaccagataatgctccttctcttccgaaaccaccacaggctgcgtgaatccatcctgctccagtgaatgtttaagcagttttttttcactggaagacatgacattgggattgtaatcgttggccaccacctcatccgctttcacccacaacacacagtccacaggctcctgtgcaaaaggactgacctcatgaagtaccctgcgcagatgattcagggcctgtatggcctcttcttctggtcgttcctggctaaagtactgacgaatcatgttgctcagtatctccggtgtcacagaatcccccattccttcctcctttctttcatacgctgcagataacgttcatagtgccggggtttgttcggactgaaggagagggtccggcaccagaaatcattctttatgagtgtcttacagatacgtcgccaggacgggatatcccggctccccaggtcattctcctgttcatccgggatgtcatccgggaagccccgcgtctgataccagcgcaggtagacagcaattttattacggtaatgttctgccgttctttccggcatcacatccagcaggaacatcgcatagctacgccaggtatgatgaggtggcttcgtgatacgcttacgcagggcaaaataggcaccgctctcattggcataaagcgccccgctggcagcacccgacacccgctcacactgtagtggcacagtaaatttggccacctgattaaaggtgatatcctcaccacaacacaaaacaggtgacttaatgaacaagaaaaccaaacgtactttcacccctgaattcaggctggaatgtgcacagctaattgttgataangggctactcatatcgacaagccagtgaagcgatgaatgtcggttctaccacgcttgagagttgggtgcgccagctcaggcgagagcgtcaggggattgcgccctctgccacacctattactccagaccagcaacgtatccgcgaactggaaaagcaggttcgccgcctggaggaacacaatacgatattaaaaaaggctaccgcgctcttgatgtccgactcgctgaacggttcacgatagttgccagactgagtgacagccactcagttgtcagcctctgttctgctctggaaatacaccgcagcagttaccagtactggcgaaaacgacgcgatacggttaatccggcgcgagtcaggttgtgcagcgaaatacgccgggcgtggaaccaaagtaggggctctgcgggggcgcgcacgctggctgaaatgctgacccaaaacggcgtcccgatgagccgttaccgtgccgggcgtctgatgaaatatctgaacctgagcagttgtcagcccggaaaacatcagtacaaaaatgctcgtcaggaacatacctgcctgccgaatctgcttgagcgccagttcgctgtgcccgagccagatagggtatggtgcggagatattacgtatatctgggcaggaaatcgctggtgctatctggcggtcgtcatggatctttttgcccgcagggttatcggctggagcctgtcagcgaatgccgatactgccctgataagcagtgccctgcggatggcgtatgaggtgcgtggtcagccgcgggacgtcatgttccatagcgaccagggaagtcaatatacaggactgaaatatcaacaacttctctggcgttacaggataaagcaaagtgtcagccgacggggaaactgctgggataacagtccaatggaacgcttcttccgcagtctgaaaacagaatgggtgccaaccgatggctacacaggcaaagacgtggcccggcagcaaatcagcagttatattctgaattattacaatagcgtcaggcctcaccattataacggagggctgacgccggaagagtcagagaacagatatcatttttactgtaaaaccgtggccagtattacttgaccactacagtcagagtgaaccactgacaaatctgatggatcagtacgtgcttatggcataccgtacatcggttgatgccgctcacagttgatgtctgagaaccacagggctggcagcagaaaaccagccctgtggtaaaatacagtaatagcggcgtacatcaggcacgccgctcactcgtccacagatcatatacgtcattatactgcgcgataacggagggcttcagcacccggtcatttctgagcgggtatgaataccattgatgatgcgaagcagccacgggcagaaacgttcttcacaaccaggtgcctccatcttcactgcagtctgaatgtgccggcttgttatccaccagaaatggtatgctccggtacatgcataccccggagactataaacgcactgaatcatagcctcccacctcagcaggaggcagtcagctttcaggcggaaaaacgttgcagttaaagatcgtgagaatcgctgtttcgttgcatagcaacccgaacagttgtagtgaaacattttacctgcatcagcacatggtcaggcgccgtctgtatggcgtggaaatactgatgtttcggctgatggcaagcctcattctctgtggaaacaggggcgcgcattagcttctcaaccagagagtgtcacaaagacaaatattgctgaaaatcgcattcatcgttcaggcgtgaatgcccggagacaaaagccgctgtccacacagcccccctctgacctgaacaaaaagtatacacacaacaggctcacctgaccccgaaaaaccataacttcagcaataccagtgacaccagcacgttacctcagtgccacatcttcagaccgcgatcaatctgaaatgtgactatcggggcaatatccctgctttgtggtacacgataaccagaaaacatcccctgaaccgccagccagaaagactggccacaaaaggggtaagctgaaatcgtttatggattacatcgacatatgcctggcagagaatgtccggaatgacgaggttatctttgcggagattaaggcaatggtatacgggccgacgttccatgccgcgttactacattcagcccggacgtaaaatgcncccgtcaaaaagaacggttcgcttcgaaactcagccaggataccacctctccgccacacccgggaagaagttgatatggtggttgccggacaacagcgctcctggattgactgctgcatcactcaaccacgctgaatatcaaaggagagcgttaccggttaaaagagaaacgtaaagctgtggtgatgacccaaaacgcaacgcctgtcagtgaggatgaaatggtgaaaagcggacagcatcagtaacggaagtatcttagcgggtacgaaaatggcaggatcgtgacattgacagaatatctcctgatcatcctgaatgactgcagttgctgtagaaaagtaagctgtctccacccacggcaccacttaacaggcattccgtaacttcccccagacttactatgacgcattatcggtgcactgaaaacgggagagtgcgcttaaaaccgcagaccgcatgcgggtgttactgcatgacagtctggccgtattgtgagatgtcggcaggaaccgatgtccgcgcaggggggaacttcctgcagtacctgacgcttcaaatggtattaaccgtagggtgttgttggttccggatcgcggaaatgggagcacaggtctgctacggggtgtacctctgacagtaaatccggctcgctcatctgacagcctctctcccggaaaagaccaaaaatgagatcgtctcctcaacagcagagaagaggtcttgacagacaggctacattgcatacgatttatgaagaaaaagacagcaaatatggaggttatagcggagaataccctacgaaattcctatgaaaaacgattgaaaaaaatatcaaattcgattcgtttttatatgctttttgggagcgtggcgatgacgaactgttgcatgtgcagaggagaatgcacccggaagcaccagaatcatccagaaaggcagaacgattacgcatcaaaccaggagacagcaatatcaaggtaatatactgatttaaaatgaatttacagcaatacgtgaaaacattttttacttaaaggagacagatgcgctgaagagagtgcaggtatttttatataaaaatgagaagtttacgggatgtatatccggcacactatgaccggagaatatcagtcaagcttaaaaagacaataaatacagtgagttaaatacacagagaaaacgtagtatcagagggtacatcttacaacagagactgaatttccggtttttcataaccggtgcattccggaaagtgcaggcggcccggaggttttctgacgccactacctggtagattgttctgtacatcatgtacggaggtttttgtttgcttttttaaaatctgcaaatgtgagaaaagcaggtgaggtgtattgtgggaaaggaactggatgatatctgcaccagctgtccgtatatcgatgctgtaaaacggcacaaacaacagctcggtgccatagaggaatatacacagtggttaaaaaaagaaccacgggcatcttatttttttctgttccagctgtatacccgcattcacaatacatttttctcccaaaagcaacaactcccgttcactcccggtggcactcactgcccggaacctgatgtcacccttcgggacttaacgctttcccctggctaccacagtgattatgcccctcaacccattccggagatggacagttctgctgttgttcccccaactaatgaaaacacctcgcctccggaagatactcccgacaacactccggccggaggcaataccggacaagcggaaaagaccagaaacgcaggactcacacccattcctgaaaaacgttcaggaatgcccccggaacatctgcggtttgccacgggttttccatcgcaaccgaagattgccggtcccagagaaaagccgatgcgcaccgtgcatccggataaaatctaccgtgaaattatatggttctgctccagttacctgctgaaatccggaccagaggctacgaggacgattatcaactcagtattctctgaatgggccagcataaacaatgattacccctcccccttttcgtgggtggacagcagggacagtgaacagtgtgactggttatggaacgccatgcaggtccggtgtgtgggaaccccgctgaatccccttaccccggagcagaaatactggtttgcctgcgccacgtttgataactgggagggctggaatgagcaacaggtacagtttttactggaaagtaatcccagacggaacagagcgaagtttacgcaggtctccttccaggcccccaggattcagcataaagcgattcttcttgatgagctgaaaagtgcccgggagcaacaaaaaaggcgtgatgaacgtgctgatggttccgtccctctgaaactgtccggaaaaatccacaaacagcttgaaagtattgcccgaagtcgtggtgtcctcccaaaaaaactgctgaatgaaatgattgagcaggcgtaccatgatttggtggcaaccaggcagaacagccaaatcgattccagataatttcagacagatattatttccgtgaatcccccgccacctttccggtgcgcggggttttgtcttttttcaccgggaatacatgtatgaatccgtctgatgccattgaggcaattgaaaaaccgctctcctccctgccttactcactttcccgtcacatcctggaacatctgcgcaaactcaccagtcacgaacccgtgcctggcattatgggtaaaagcggggccggtaaatcctcactctgtaatgcgctgtttcagggggaggtcaccccggtcagtgatgttcacgccggcacccgggaagtgcagcgcttccgtctgaatggccatggtcacagcatggttatcactgacctgcccggggtgggcgagagccgggacagggatacagagtatgaagccctgtaccgtgacattctgcccgaactggacctggtactgtggctgattaaagccgatgaccgtgccctgtctgtggatgagtatttctggcgacacatcctgcaccggggacatcagcgggtactgtttgtggtgatgcaggccgataaaacggagccctgccatgaatgggatatggccggtattcagccttctcccgcacaggcacagaacattcgcgaaaaaacggaggcggtattccgtctattccggcccgtacatcgggttgttgccgtatcggcccgcaccggctgggaactggatacgctggtcagtgcgctcatgacagcacttcccgaccatgccgccagtcccctgatgacccgcctgcaggacgagctgcgcacggagtctgtccggtctcaggcccgtgaacagtttaccggtgcggtggaccggatatttgacacggcggagagcgtctgcattgcctctgttgcacgcacggttctgcgcgccgtccgtgactcggtggtctctgttgcccgcgcggtatggaactggattttcttctgaacccggtggtgatgtaccaggctgttgttacagatttttaactccatgaaaacactatgcaaacgcagccatacccgggttgtccccttgcgttgtgcttctcaagttaatagaatgcatcgatcgttactatcatatcgatcgttataaacgatcgtttgtggtaaatgacctcctccgtggttgtcatgaaaatgcgtctcaggaaggttaaataatgcacgaaaagaacatcgccctgctttgtgatgaagccgaccgacttttgcaactgaacataaatctgctccggcaaatggttgaggagccagatgtgttatctgacagtaagaacgaaaacagactgctttttgataaacagaaagcactgaaaagaattgaggagctggagggcgaacaaatcaaaaccgcccgcagggagatggtgctggctgttgtcggcacgatgaaagcaggcaaatcaaccaccatcaacgccattgtggggcaggaaattctgcctaaccgtaaccgccccatgacctctgtaccgacgctcatccgccacgttcccggaaaaactgagccggttctccatctggaacatattcagcctgtccgcaatttattaatcacactgcaggaaaaactcgccaccccggcaggacagcaggtcgcacagaccctgcagcaaaccggggatacccgcgaactgctggatattctgacggatgatggctggctcaaaaatgaataccacggggaggaggaaatctttaccggactggcatcgttaaacgatctggttcgtcttgctgcggcaatggggactgaatttccttttgatgaatacgcagaagtgcagaaactgccggtgatcgacgtggaattcagccatctggtggggatggatgcatgccagggaacactcacactgctggatacccccggccctaatgaggccggacaaccgcagatggaagtgatgatgcgggatcaactgcagaaagcctctgcggttctggctgtgatggattacacccagatgaactcaaaagcggatgaagacgtccgtaaagagcttaatgccattgctgacgtatcagccggcngcctgtttgtactggtcaataaatttgatgagaaagaccgcaatggcgatggggcagatgccgtacgccagaaagttccggcaatgctgaacagcgatgtgctgcccgcctcccgcgtttatcccggatcctcacgccaggcatacctggctanngtgcgcttcatgagttacggaaaaacggaacccttcctgttgatgaagcctgggtcgatgattttatcagaggtgccttcggttgcatgaaaaaagaatacgtctgtaaagacagtgaactggcaactgaaggggcgacagacctgtgggaaggctcacttatcgatcaactgataacggaagtcatacagagctcacattccagagctgcggcactggcggttgactctgccgccgcaaaactgatgcagaatgcagaaaatatcagtgaatacctgttgttacgccatcaggggctacagcaaagcattcagtcactgcagtcgcatatcaccagcctgcttgcggatatccgggaaatcgcggactgtcaggagcagatgaccactgatgtcagaatggccatggaggagatcgatactaaaacccgggaattactgacgggggtctgcacctcactggaagaggagctgaatgactatttcagaagcggtaaacgcaaagaacagcaaatgctggaggaagaagacgcagaacaacgaaggtctcagtccggattatgggggaaaatttctcaatggtccggtatcaacaaccagggccgggaggattacaggaaacgagattttgccccggacagccccgaaataaaattcagtgatcgcagggaagcccttgaactgatgacgcaaatcgaatcgaccgtgaccagcctgcaccgtgaggctgaagcacagttccggcctgagctggagaaaatcgtcagcgggattgaaacaggttttcgtggcacggccctgtacgccacagaaaacattgccggtcgcatcaatgcccgcctggaggatgagggctttaccgtaaaaatcagttttccggcagtcagccagttacagacccggctcgcggtaaannaaatctgagtgcgcttatggaggaaagaacggagnncgtcannnnnnncgtcggcagagtggcgtatggggaccgtttgtcgatggtttggcaccagtgacctgggctgggaaaactatgacgnnnnnnnnnnnnnnnnnnnnnnnnnnnnnnnnnnnnnnnnnnnnnnnnnnnnnnnnnnnnnnnnnnnnnnnnnnnnnnnnnnnnnnnnnnnnnnnnnnnnnnnnnnnnnnnnnnnnnggggttaaataatgcacgaaaagaacatcgcnnnnttgtgatgaagccgaccgacttttgcaactgaacataaatctgctccggcaaatggttgaggagccagatgtgttatctgacagtaagaacgaaaacagactgctttttgataaacagaaagcactgaaaagaattgaggagctggagggcgaacaaatcaaaaccgcccgcagggagatggtgctggctgttgtcggcacgatgaaagcaggcaaatcaaccaccatcaacgccattgtggggcaggaaattctgcctaaccgtaaccgccccatgacctctgtaccgacgctcatccgccacgttcccggaaaaactgagccggttctccatctggaacatattcagcctgtccgcaattnannaatcacactgcaggaaaaactcgccaccccggcaggacagcaggtcgcacagaccctgcagcaaaccggggatacccgcgaactgctggatattctgacggatgatggctggctcaaaaatgaataccacggggaggaggaaatctttaccggactggcatcgttaaacgatctggttcgtcttgctgcggcaatggggactgaatttccttttgatgaatacgcagaagtgcagaaactgccggtgatcgacgtggaattcagccatctggtggggatggatgcatgccagggaacactcacactgctggatacccccggccctaatgaggccggacaaccgcagatggaagtgatgatgcgggatcaactgcagaaagcctctgcggttctggctgtgatggattacacccagatgaactcaaaagcggatgaagacgtccgtaaagagcttaatgccattgctgacgtatcagccggccgcctgtttgtactggtcaataaatttgatgagaaagaccgcaatggcgatggggcagatgccgtacgccagaaagtccggcaatgctgaacagcgatgtgctgcccgcctcccgcgtttatcccggatcctcacgccaggcatacctggctaaccgtgcgcttcatgagttacggaaaaacggaacccttcctgttgatgaagcctgggtcgatgattttatcagaggtgccttcggttgcatgaaaaaagaatacgtctgtaaagacagtgaactggcaactgaaggggcgacagacctgtgggaaggctcacttatcgatcaactgataacggaagtcatacagagctcacattccagagctgcggcactggcggttgactctgccgccgcaaaactgatgcagaatgcagaaaatatcagtgaatacctgttgttacgccatcaggggctacagcaaagcattcagtcactgcagtcgcatatcaccagcctgcttgcggatatccgggaaatcgcggactgtcaggagcagatgaccactgatgtcagaatggccatggaggagatcgatactaaaacccgggaattactgacgggggtctgcacctcactggaagaggagctgaatgactatttcagaagcggtaaacgcaaagaacagcaaatgctggaggaagaagacgcagaacaacgaaggtctcagtccggattatgggggaaaatttctcaatggtccggtatcaacaaccagggccgggaggattacaggaaacgagattttgccccggacagccccgaaataaaattcagtgatcgcagggaagcccttgaactgatgacgcaaatcgaatcgaccgtgaccagcctgcaccgtgaggcnnanngcacagttccggcctgagctggagaaaatcgtcagcgggattgaaacaggttttcgnnngcacggccctgtacgccacagaaaacattgccggtcgcatcaatgcccgcctggaggatgagggctttaccgtaaaaatcagttttccggcagtcagccagttacagacccggctcgcggtaaaaataaatctgagtgcgcttatggaggaaagaacggagaccgtcacccgtcgccgtcggcagagtggcgtatggggaaccgtttgtcgatggtttggcaccagtgacctgggctgggaaaactatgacgaggatgtgagtcgcagcgtgatcaatatcaacaaggtcagagaggaagttatgtcactgacccgggcanatttcggggagctgcaggcgtccattgagcaggatattaaccagcccgtccgccaggaaatcgatgcctttttctgcgcattcagggagaaagttgaacaactgcgtaacacgctgattcagagctctgaagatcataaacgcgatcagcaggcgcaggaacggcttaccgggcgacttcaggcattaaatgaaagggttcctgagctcattactgacagtaaggcgctgagggaagagctggagacaatgctgtgacttcaccatttattcaacaaattgctgataaccgggtatgtcaggtactcacctgtcttcctgaaaaatttgtggttgatttcgcaaacggaatcgatgttgcacaggagcatatccgcacggccggagagcgcacgttcttccggcgtttaaaagaggggctgaccggcgaaggcgctgcacggcagaatgccatcaatgcgtcgcttgcacagggcgttgaggcgtccctgcgctggctgacggagatgacaacgtcacttgccaccacaaactacgcgattacccgggtaaacgacagggtcagttcactggtcagtgatacagccaggctggcgcattattccgcagatacgcgggagcagttactcaccctggccgatcaggttcaccataaactgaatcatcttgaagaaaaactccaccgtgttgaccaggttcagcgggcgcagttacatcttgagcagatattctcatggtggagcgccgggcgatatgcgtcattttcccctgccggacgttgttatgtggcacttgaagagcttcgctggggcgcgtttggtgatgtgatacgtcagagcgaaacaggccaggttaaccagctactggatattctcagacataaagcattaacgcagatggcacaggagagtggcggtagtgcaaccgtgcgtctgaacactctggactggcttggtggtcagggccgggagcaggcagataacgagtggcatgacgcgattaactggctgggagactggtgcagtgaagagcagcatccggtgatctggtcaaccacgcaggctgcagaacacttaccggttcgcatgcctcgcctctgctctgcagaacgcctctctgaaagtatggtcgatgaaatatttcagaagggggctgcatgagtacagaaatgaaaacggggctggtgctgtccggtggcggggcggtgggcgcttatcaggcgggagtggttaaggcactggcagagtgtggtacacagatcagcatggtttcaggggccagcattggcgcattcaatggtgccattatcgcggcctctaccgatctgtcagaagctgccgtacgcctggaggcgctctgggatcatctggggaataatcaggtgctgtcggtaaacagattggtttacttttcattgctgaaaaaattgttccaggcaatgaacctctgccagatccccggacgtgcaggagcactgcttacgacgcttcttcgccatatatcgacaatcaacgggtttgacaatctgatggctcagccgttgttgtcagatgagcccctgacagcgctgatggatcattatcttgatactgatgctctggcagacgggctaccgctgtatgtgtcgctgtaccccacagaagggggcatgcaggatattattgactgcattcgtgctgaactgggtgtcggaaccacgaaaaacgccgtttttcagcatatccagagcctgccccgcggacagcagaaagaggctctgcttgcgtcagccgcgctgcccctgctgttccgtccccgtgaggttcaggggacaatgttcggtgatggtggtatgggaggatggcgaaatatgcagggaaatacccctgtgacgcctctggtcgatgccggatgcaatatggtgattgtgacgcatctgagtgacggttctttatgggatcgccaggcttttccggacaccacaatccttgagatccgtccccggaaaaggctgaaatatgcaggtgatggtggcaacagcggcggtctgctcagttttacatcggcacataccgacgcctggcgtcagcagggctatgaagacacgatgctggcgatggagcatatccggaaaccgctggcagcacgtcaggcactgacccggtcagaggcggtattgcagaaaagcctggatataacggaagaggcagatttggcactgagaaacgcgatggcccggattaaataaagacgccccaaagaaacgccaccgcctgtggtggtgtttttcctgtctggtgttattgaaaatatnttcagatatatattacctgagagaaagttttacccctcacctgtcaattcactcactggaaatttaattatgaaattacctgtaaagttattaatgagccttatatctctggtccgcgttattgcacgtgccggggaatatanaaattacagccgggatgaaataaaatactggcgatatacatcatacaagggggggaaacttccggaaggtttcactgatgagaaattttccagcgccatttacaacggaagaatatttacaatgaaacgtttacatacccttatgttatttctggcggttctgttcacgggctttaactttaacgcagaagcggctaccgtaaaacaagctcttagttgtaacccggaagcctgggctgaacaacctggagcgtgtccatcaacgtacgagttgtacgaaggtgacgctacctacaaagccgctatcgacaaagcattaaaaccggtcggactgagcggcatgttcggtaaaggcggctatatggatggccctggtggaggtatcacgccagtaaacattaacggtacagtctggttccagggcgacggttgcaaagccaatacctgcggctgggactttatcgtaacactctataacccaaaaacccatgaagttgttggctaccgttactttggtttagatgacccggcctacctggtttggttcggtgaaattggcgtgcatgaattcgcgtatctggtgaaaaactacgtagctgcggttaactaatttaaggagtctatcatgaaaacttttatcaaaactttactcgttgctgtaactattctgttctctgtcttcgctactgcgaaacaagtaaaactgccaaataacatcaaatacgttaatactacagaagcgttttcctgtaccgaaattgacggtatgaattgccagacaaagaatcagttcaactataaagataacagctatgttttcgtgcttgaacgtggtggtgcctggtgctacgactacactgtctcggtagttaacctgaaaaccgggaaagcacaaatgattgaatacggggacaatcaactgtgctcaggtagcaacaaaccgttcttcgaaatcaaaaatggcgtaccgacggtaggagtcatcgacacatccggaaaacctgtcggtgtagcccaggacaaacttaaaatctaaggagtaaaccatgcgtttctctgcacattattaatatcaaaggtaaatacagccccagccattgttaccggaaagccgcttaatgcgtggctcgccagtgaaaggcctctcagacaataaaccttattcatttcacccgtcaggccncgtcttctccgggagacgcggcttttttcatttattgcaccagtaaatcttaaccaccgataaggagcaaagtatgcgattagccagtcgttttggttatgctgcaaaccagatacgccgtgaccgtccgctgacacatgaagaactgatacgccatgtacccagtatttttggggaagaccggcacacctcccgcagtgaacggtatgcgtacattcccaccattaccgtcctggaaaatctgcagcgggaaggctttcagccgttcttcgcctgccagacccgtgtgcgcgacccgggccgccggggatacacaaaacacatgctgcgtctgcggcgggccggagagataaacggagaacatgtccctgaaattattctgctcaactctcatgacggtacctccagctaccagatgctgccgggttacttcaggttcgtctgccagaacgggtgcgtctgtggccagtctctgggggaagtgcgtgttccacaccggggaaatgtagtggagaaagttatcgaaggggcttacgaggtggtgggcgtgtttgaccggatagaggagaagcgtgatgccatgcagtcgctggtcctgccgcaaccggcacgccaggcgctggcacaggcggcactgacttaccgttatggtgacgaacatcagcccgtcaccaccgccgacattctgacgccgcgacgccgggaggattacggtaaggacctgtggagcgcatatcagaccatccaggagaatatgctgaaaggcgggatttccggtcgcagtgcaaaaggaaaacgtatccatacccgggccattcacagcattgataccgacattaagctcaatcgcgcattgtgggtgatggcagaaacgatgctggagagcctgcgctgatgccgtttccctgagtgagggaatcattcagctttcgttcccgaaaaacacacatttatttgttatttaaggagttatctcatgaaaaccgtttctcagaatacccccacaatttattcagctacaacaccagagaataatccgcctcagttggttgccagcctcgtccctgatgaacagcgcatcagcttctggccgcagcattttggcctcattccacagtgggtgaccctggagccccgtgtcttcggctggatggaccgtctgtgcgaagactactgcggtggtatctggaatctgtacaccctgaacaacggcggggcatttatggcacccgaaccggatgacgatgatgacgaaacatgggtactgttcaatgccatgaacggtaaccgcgcagaaatgagcccggaagccgccggtattgccgcctgtctgatgacgtacagtcatcatgcctgtcgtacggagaattatgccatgacggtccattattaccggctgcgggattacgccctgcagcatccggaatgcagcgccattatgcgcatcatcgactgaatggagagaagcacaatgcaacaactttcctttctgcccggagagatgacgcccggcgagcgcagcctcattcaacgggccctgaaaaccctggaccgccatcttcatgaacccggtgtggccttcacctccacccgtgcagcacgggaatggctgattctgaacatggcgggactggagcgtgaagagttccgggtgctgtatctgaacaaccagaatcagctgattgccggtgaaaccctcttcaccggcaccatcaaccgcacggaagtccatccccgggaagtgattaaacgcgccctgtaccacaatgccgctgccgtggtactggcacacaatcacccgtccggtgaagtcacacccagtaaggcagaccggcttatcaccgaacgtctggtacaggcactgggcctggtggatatccgggtgccggaccatctgatagtcggtggcaaccaggttttctcctttgccgaacatggtctgctttaacccgtcacaaccacatcacacctgttttcacttttatcttctgtcttcagaggtatcccattatgaaaattatcacccgtggtgaagccatgcgtattcaccaacaacatccgacatcccgtcttttccgttctgtaccggtaaataccgctggcacggcagtgctgaagcgtataccggtcgtgaagtgcaggatattcccggtgtgctggccgtgtttgctgaacgccgtaaggacagttttggtccgtatgtccggctgatgagcgtcaccctgaactgagtgggaattctgatgagcagaattatcgccactaccggaccattcttagccgattttctgtaaggattttatcgtgtcagacacactccccgggacaacacttcccgacgacaatcacgaccgcccctggtgggggctgccctgcaccgtgacgccctgtttcggggcacgtctggtgcaggagggtaaccggttgcattaccttgccgaccgcgccggtatcagaggcctgttcagcgatgcagatgcgtaccacccggaccaggcctttccgctgctgatgaaacaactggaactcatgctcaccagcggtgaactgaatccccgccatcagcataccgtcacgctgtatgcaaaagggctgacctgcaaagccgataccctcagcagttgtggttacgtttatctggctgtttatccgacgcccgaaatgaaaaattaactctccagaatagccttctgctacggcctggtgttttcaccacgccacttttccatttttatatctgcatatcaggaaaatcttcagtatgaaaacattacctgtattacccgggcaggcggccagttctcgcccgtctcctgttgaaatctggcagatactgctgtcccgactgctggaccagcactatggcctcacactgaatgacacaccttttgccgatgaacgtgtgattgagcagcatattgaggcaggcatttcactgtgtgatgcggtgaactttctcgtggaaaaatacgcgctggtgctaccgaccagccgggattcagcgcctgtacccgctctcagttaataaacagcatcgatatcctcctggctcgcagggcgaccggcctgatgacccgcgacaattacagaacggtaaataacattaccctgggtaagtatccggaggcgaaatgatgacactggaagccgacagcgttaacgtacaggcgctggatatggggcacattgtcgttgacattgatggtgttaatatcactgaactgattaataaggccgctgaaaacggttattcactccgcgtggtggatgaccgtgactctaccgaaacaccggcaacttatgccagccctcaccagttgctgtaagacaatgcagtgatgcagggtatagtgccattaaccacagaaacagcactgttgtcctgtattaagcaggcaagagaagatgtccttaccctgcgccatctgcagcttctgcaccagaaccggtgaatctcactcaacaggcttcatttcccctgacgccagcctgaatacagctggcgttttcatttataaacagaaaggaaaaccgataataatggaatggacgccccgaccatgaagcaacggnnnnnatattactgataaaccttccagtggaggtgcgttatggccgttttaacgattagcattgacctgacaaaaaatgaattccaaatccacggtctgggtaggaacagaaaaatctaagctcagaaaacggattaaagtaagcgtcaacggagcaccgtattgacgcttatttattggtgagaactacgttccatggcaggagttcgtcaacacggttggagggccattccggcagtatgctcagaatatggcgcagatacgcttccggatcgataccgttcagacggcaggtgcctgcttttccggcaacaagcaggaatctcagcgctgaagcaggaattagaggtaaaaacgccctaccgggccatgaatcacccggtcattggagtagtaaccaaagcagatttagccagcatggaacaaatatctttggtgaaatgttggttacgggaagctggagcgcacaacgtgttagtaaccagtgcggttaataacaatggagttacagaactttttgccttgctgcatacagaagaaggctgccgctaatttcgataggttctcagatgagaatgatgacggtgatacacagataagaatcaatgagcaatgagggttgccgggcaaccctcattgaataaaacaggaattacttcgcttcgccgtttttcatttcgcccatagctttcagctttttggagatatcgcggcgttctttggagagctcggcatttttgatgatgtaatcgtcaacgcgatcttcatagtcacctttcatgctggcgatgatgccctggattgcttcaacgctcatccctggcttgatgtaatcgctcaggttgtccagcaacaggacgcgcttctggttgtcacggatctttttctcaacgtcctgaatttcacgttgcagtttgttcttacgacggaacagacgaacaaattccagtacgtcctggaatgaaggcttggtagtttccatttttatacccctgataatgtgagagtcggattcgtttaagcaaccgctattcgttagggccaacattactcatagctgccgcagatgacaatgcttttatcccttatcactatcataccctttatccttgctgaatcgaagcagcagcaagatgattctgaagttcaggaattatttgcgcaaggcccggcaaatcagactcgatagcaactcaagctgatgtgccgtttccatgttcagccacacataaccatagattggtgtttccacaaccttcaggtcatggtggttattcagcaactgacgcagctcttccacagcatcgttcaatttttccgtattggcaaaaaccggctgcggattaccttcgtacagcgcatgaacaaggctcagcagtatttgctgcatcatgtgctgggtatcacgaagtttttgcgcgttcaataacacgaaatggctggggcgcgtggcccagtatgcattgatttgcaactccagcatacaaaccagattgcggttaatggtctggataccttcatatatcgattttggaatacgagtttctttgctggcgggcgcaatcagcccacgcattttcacggcatcggtcaggagtttttgtagatggctttccagacgtgggcgttcgagtaagttcggtgagaatgcagattgatagacccgattatactcggtcagacttttcgccagttgaatgcgccagtggatgaacgcccgttgtggccagataccggtaaacaacattgccagtaaagagccgaggatcacatcgccgcttcgccataacgccgtatcaatttcacctgtcggggaacccacaacaattgccagcgtcaccccaatcaataatccttgatacggtttcttgcccagcgccagccaaccgcaaagaaacatcgccgccgcgcaccagactaacatcagcggtaacgaaattaactccagttgcagagcgataagacctaaaatcgaccccaacaccgtaccgccaatacgttcgaaggcacgagggacaacgttcccccagaacgagattggccccataatcaccaccatggtgaccagcggccaggtgctttccgggatagtaaacaggcggataatgagaaaagtgagcaggaatgccagcgcgacccgagtaccatgcacaatgcggtaatggcggtatacccggatttcaaacgggcttaatgacttattggcacgcacgcagaaactccgttaatgaagattaaaagcgctcataacacatctgtcggtcagaaggcgcgcctctgaattatccgacggacaaaccgggaacagtgtaatttcccggcaggagcgaaaaaattgaaaggcgcatcttactcttttcgctttcaaaaaaagagtggtcttcgcgtcaacacaccgccctgagatgaattagtgatgttttggctgcaccgcaacatacatttcgatatcccagtacccatcttccgcgccattgttcaagtaaacctcgaagcagggctttggtaacatttcataagcactgtcctgcaagaggctattaaagaactgataccagggtttagcaaaatcatcaccgactacacgagccaccgccaccgcatattgaccacctgaaatttctgtcagaatgacgccctcactgttttcggggagcgtaaagttattcggtaccgtcacgactgtgtcgcagcgtaatttttcggcgggtgtttcatccggattgtcgtaatagacagcaacccactccttcggcacaatatttttgctatctacccacatcatcaactgctcaaaacctttctttaccatctgttcccacgggccaacgagatggaaacctgcaacggtacgtttatcttcctgcttaatctcgtagttcatgacgcctccattattactgtttttatatacagtatagttgcaatattaaaaccacaaggaatgagtgttgattatgcgagcagactcgcactcctgccagtctgctgcaaaagaaaggtcaggccttatggtggaaataatcactcaggcgagaaaacatgctgccttccccgacagattccagggtaaccagcggccagtgcgccacctgtttatcacggtcgtaaagttcaatttcccctacccgctgatgggcgctnattggcgcggtgagctctttaccatcaagggtatatttggctttgatatgtggaatttcggctttcggtagcaccatccagaactcttgttccgttcccagggcgatattttctttatcgccataccagatgcgttccgtaccgacctttttcccacggtgcaaaatttgcaccgtagtaaagttttgttgcccccaacgcagtaattttcttgcctcttcctcacgaccttttgcactgtcagcccccattaccactgcaatgagacgacgctgcccatctacagccgaagcaatgagattaaacccggcaccagaagtatgacccgttttcaggccgtcaacattcatggttttatcccacaataacccgttacggttttgctgggtgataccgttccaggtgagacttttctcactgtacatatgataaaactcgggctcgccgtggatgatagcgcgagaaagcacagctaaatcataagccgagctatgctgacctggtgcatccagaccatgcactgtttcaaaatgcgtatccttgagatgcagcttctcggcatagttgttcatcatttcaacaaactgccgttgcccaccggcaatatagtcagccagtgcaacacaagcgtcatttccggaatccacaattaaaccacggcttaaatcacgtaccgatacgcgatcgccctctttcaaaaacatcagtgaagaaccgacaaacactggattatctttcgcccacgcatcgcgccccacggtgacaatatcgtctggcgtaatgcgatgactatcgatagcgcgatccacgacatagcccgtcatcagctttgtcaggctggcgggattgcgctgttgatgctcattacccgcggtgaggatctgaccggtggtgtaatccatcaatacccaggagccggcatgaatctctggaggctgaggtgaaaaaggaatgttttccgccgcaaaaccagncgataagttaaaaatgaacaaagaagcagcaataataagacggcgtttcaacagcaaaccctcaggagttnnnnnatagctgttctttttacggaaatacttatgaactggctggaataaagtgcaagaaaatgtgactaccctctcatttttatctgacatgatctgttgccactcgctgtcaaattgtcgcgctaaagctgattagcacggtgatatttgatactctggcagacagcagaaacaacggatttaacctaatgatgaatgacggtaagcaacaatctacctttttgtttcacgattacgaaacctttggcacgcaccccgcgttagatcgccctgcacagttcgcagccattcgcaccgatgacgaattcaatgtcatcggcgaacccgaagtcttttactgcaagcccgcggatgactatttaccccagcctggagcagtattaattaccggtattaccccgcaggaagctcgggcgaaaggagaaaacgaagccgcatttgccgcccgtattcactcgctttttaccgtaccgaagacctgtattctgggctacaacaatgtgcgtttcgacgacgaagtcacacgcaacgttttttatcgtaatttctacgatccttacgcctggagctggcagcatgataactcgcgctgggatttactggatgttatgcgtgcctgctatgccctgcgcccggaaggaataaactggcctgaaaatgatgacggtctaccgagctttcgccttgagcatttaaccaaagcgaatggtattgaacatagcaacgcccacgatgcgatggctgatgtgtacgccactattgcgatggcgaaactggtaaaaacgcgtcaaccacgcctgtttgattatctctttacccatcgtaataaacacaaactgatggcgttgattgatgttccgcagatgaaacccctggttcacgtttccggaatgtttggggcatggcgcggcaataccagctgggtggcaccgctggcgtggcatcctgaaaatcgcaatgccgtaattatggtggatttggcaggagatatttcgccattactggaactggatagcgacacattgcgcgagcgtttatataccgcaaaaaccgatcttggcgataacgccgccgttccggttaaactggtgcatatcaataaatgtccggtgctggcccaggcgaatacgctacgcccggaagatgccgaccgactgggaattaatcgtcagcattgcctcgataacctgaaaattctgcgtgaaaatccgcaagtgcgtgaaaaagtggtggcgatattcgcggaagccgaaccgtttacgccttcagataacgtggatgcacagctttataatggctttttcagtgacgccgatcgtgcagcaatgaaaattgtgcttgaaaccgagccgcgtaatttaccggcactggatatcacttttgttgataaacggattgaaaagctgttgttcaattatcgggcacgcaacttcccggggacgctggattatgccgagcagcaacgctggctggagcaccgccgccaggtcttcacgccagagtttttacaaggctatgcagaagagattcagatgctggcgcagcagtatgccnacgataaagaaaaagtggcgctgttaaaagcnctttggcagtacgcggaannnnnngtctaatgtgaagcctccgccgctggtacggcggaggacaatgttgagtcaggctttttgaacggtgatgctccacgctgcatcgccaatctgctgataatcggtgatggcatgcccttcttctgccgcccactgtgggattgcttcagttgcctgggtgcaatcaaactcaattaccaactcatcgccgctggccatttctgccagtgctgcttttgcttctatgagtggaaacggacagacctgcgtcaccacatccagctttttaatcgccatctttacaccttacttaatttgccgcagcagttgccagtcgcgccttacgctgcggtcgaacatacacaagccaggacgcagtccagantccgagaatcataaatacaaggccaacccagccctgccaggtcatcattgcagtcataaccagtccattaccgatagagcaaccacctgcaatactggcaccgaagcccatcagtacaccacctagcccgctacgtactgttgtttgtgcatcagctgcgcgaacgcggaactcacggctcgctttggctgcaataaatgcccccacgaagatccctaacaccaggaaaacgccccagttaatgtatttcacgtcacccgcgaccagaaattgcagaatattggccgttggggaagtgatgcctaacccaaacatacgtccggttgcttcactcaggggccaggctaaaagcgcaatcaaaccgatgagtacagctgtgacaaagggatgccagcgtttttcaaacagaatatgagcgatcccggttcggcgcggcggtaaggtcgcnactttgagttttggcttcttcaactctttcatcaccacccagagcgttatcaccagcaaaacggcaaccaacggccacacagacaaattaaaagtctcagcaatagagttatgttcagtagtgtagtgctgcaaggtttgatttaaaccactggcgtgtggagaacgcatcaccgcactcatcaccatataagtgaaaagcgcgatccaactgccgatcaatccctcacccgcgcgataccaggtcccggtggcacatccacccgccagaacaattcccagcccgaagagatatccacctataacagtaccaagccacgggaacgccccggcttcgtaagtcagtaggcccgcctgaattaacgcaaaaacccccacgctttgtaccgaaattgcaatcagcaaggcgtaaaacatgcgattatttttcgcgatatacatatcgcgaaaaccaccagtcaggcaaaaacgcccacgctgcatgacaaatcccagcagagcaccacaaattagcccgcttaatatcattgaaaacataaattaattaaccagatgaatgttaatggggaaattattcatgactggtggaatgcagaccaataaccaaattctctaaattagaacaaatggttattaatgaggatttcgataaaaaagaataaaaaaaccggagccaaatgttcattcgactccggtttattattagaaatgatgattatgctacgtcttcgtactgcggaaccgggttacggaagctcttggtgacgcaagccaggtaaatcagaccgatagcagcccagatcagacccagaaccattgagctttcttccaggttaacccacagcgcaccaacggtcagcgcaccacacatcggcaggaacagatactggaagtgatctttcagcgtcttattacgcttctcacggatccagaactgcgagatgaccgacaggttaacgaaggtgaacgccaccaacgcaccaaagttgatcagcgccgtagccattaccaggtcgaagttgattgccagcagggcaatcgcgccaaccaggatgatgttcatcgccggagtacgccatttcgggtgtacataaccgaagaaacttttcgggaacacgccgtcacgacccattacgtacatcagacgcgctacgcctgcgtgcgccgccataccggacgccagtacggtaatggtggagaagatcagcgcaccgacctggaacgctttacccgcaacgtacagcatgatttcaggctgtgacgcatccggatctttaaagcgagagatatccgggaagtacagctgcaggaagtaagttgcaaagatgaagatcatgccgccgatcagcgcggtcaggaaaatcgcacgcgggatcacgcgctctgcatctttggtttcttccgacagattgctgatgccgtcaaagccggtaaaggagaagcacaggattgtcgccccggtaatcatcgggataacatgcgcatcgccagaccagaatggacgagtgctcgccagcgtaccagcgccttcaccttcaaatacgccataaacaaccatgcccagaatcaccgcgatcagcactacctgcaacacgacgattacagtgttgaagttcgctacggatttcagactacgcaggttaaaggcggtcataaaggccaccagcgccaccacaaacatccacgatgggatggaaggcaccagagcttcaaaatagattttcgccagcagaatgttgatcatcggcgcgaacagatagtcgagcagagaagaccaacccaccataaagccgacagtcgggctaatggatttctgggcgtaagtatatgcagagccagcagaaggatagcggcgaaccagcttcccgtagctcagagccgtaaacaggatcgcaatcaatgcgaacgcataggctgtcggcacatgaccatccgtgaggcctgaaacgataccaaaagtatcaaacagcgtcatcggctgcatataggcaagacccatcattacaaccggaactaacgtaagcgttttacgcaattccacgcgagaggtgtttggagtaacgttatgcgacatggtcattctcctttacggtgataaccgtcgcgtaagcaaaaaattgccccatttttttggattcctcagcgacaacaactgtcgatttttagtaaatatctatccggtacgaagcccggcctcttggtatgaatgattggtttgaagcaaaaaataaccgacgctgatgaaacgtcggtttttagtcattttttgacagcggcgcattgtgcctaaatgggggggaaatgacaagagaatgagaggcttgtcataataatttttctttaaatggctgattttccgtcatcagattttgcataaacaccggcgatcgcactatttgctaaaatttcatcccgccaccagccgctggcaagtcctgcggtctgttcattccagccaatccagacgggttcaaagagagtttgggcgaccactttcttctcgattaacgcgccactatcgagaaaacgttgcgccagataacggggtaaatagccgcagccgaggccgctaatttgcagctccagcttggttttaaaatcgaaaacggtaatggcttcttgttcgtcgagaagttgtgaggccgtagaagcgcctgcctgcgcagtgtcccccaccacaatcgcccgatatcgtttaatgatacgacggtttaatggttcttcttcctgggctaacggatgatgaggcgcgaccgcaaagacttgttccagatcgcccaaccgcgagaaaccaaactcactggaagatggtggctcatgcatcgcgccaacaataatatccgctcgcccctgagtcagggcatcccatgaaccaccgagtacgccattgataaacttcaggcgcgtcacgttatgatgttgataaaaagcttcaatgagtggcgcaagcagagaaaaaggaaacgtgtcgtccacgccaatcaccagctcgttttcccagccttcatgcagtttgatcgcctgcttttccagttctcgcacggtatgcagaacttcccgccccttctctaataacatttttccggtacgggtgaatttagcgcggtgaccgctacgatcaagcaattgaatattaaggtcgctttccagcttgtgaacggtgtaactcagagcggacggcgtcttgtagagtttagccgacgccgccgcaaaactgccttctttttctaaggcatcgaggatcatcaacacatccagcagtggtttcatacacgcccccttgcagtgcatgcggcgtcctgctggcgtgatcgtttactccagcggcattaccagcggatcgggatactggtattcaaatcccagttcattacaaatccgactgccatcaataatcttacctttgccgctgtccagactatttctgaattgcggaggttccagccccagtaaacgggccatctgcggatagaaaacattacgcgcagggtgagctggcgcacatatattatagatgtgtccgcctttaggtgcctgtaacaacagagtgatagcgccaataacatcttctaaatggactaaattaacaccatgttcaccatcaggcgcggtttttccggcaaagaagcgtccgggatgacgccccggtccgaccaggcccgcaagacgcagaatatcgaccgaagtaccgggtaaattgtgcagccagtcttcgagttcttctaatactcgtccactgttggttaccggattacgcggtgtagtttctttcaccgtgccttgcgcgtcgccatagacagacgttgagctggtaaaaataatgcggggaatacgatgggccagcgcgctatccactaactcttgtaccgcttgtaaatagaactcatcgccggggccgctacgacgtgccggaagcgtaatgaccagcgcatcggcatccatcagggcatccagatcgtcagaatcgcaaactaactcaggctccatgcgaagcagatagctatcaatgccactcattcgggccgcttcgacaccatcttgtgtggttttactcccggtgacttgccagcctcgcgctgaaagtgacatcgccagcggcatgcctaaccaccctaacccgacaattgcgacctttttcatccgttatctcctgatacaccttagatctataaggctacgctagcgtatcaaaactgacaattcattctatgaatgaatctcttcaataatgataacgacatgctgcaatgagcagtgaatcgtcggtaaccgcgtataccagacggtgctcctctgtaatgcgtcgggaccagaaacctgacaaattatgtttcaggggttctggcttccccttaccttcaaatggtgttctgcgggtatctttgataagttcattgatctttttaacaattcgcttatctgtttcctgccagtacagataatcatcccatgactcctcagaccagattagtttcactcaataatgtccttttccgttcctttgcctgatttcaggctatcgattgagtccatcaatctccgggcgttagcgggggagcgcagtagataagccgtctcttccagcgagttgtattcttcgagtgacatcagaacacaagcctctccattctgacgagtaataaggatcggggcatgatcttcaacggctttcatcattgttgccgacaaattctggcgcgcttcgctgtagctaattgtacgcatttcaatctcctcttttgtacagttcattgtacaatgataggcgttaattaactatttattaattagtctgtagatcaagacattgtcagtgagacgaaaaatccaggtttcgctattttgggtgccgtcaggttaggggacactcctcttagccccctcctttccccgctcattcattaaacaaatccattgccataaaatatataaaaaagcccttgctttctaacgtgaaagtggtttaggttaaaagacatcagttgaataaacattcacagagacttttatgacacgcgttcaatttaaacnnnnccatcatcaccatcatcctgactagtctttcaggcgatgtgtgctggaagacattcagatcttccagtggtgcatgaacgcatgagaaagcccccggaagatnnnnntccgggggcttttttattgcgcggttgataacggttcagacaggtttaaagaggaataagaaaatgacagacaacactcgtttacgcatagctatgcagaaatccggccgtttaagtgatgactcacgcgaattgctggcgcgctgtggcattaaaattaatcttcacacccagcgcctgatcgcgatggcagaaaacatgccgattgatattctgcgcgtgcgtgacgacgacattcccggtctggtgatggacggcgtggtagaccttgggattatcggcgaaaacgtgctggaagaagagctgcttaaccgccgagcccagggtgaagatccgcgctactttaccctgcgtcgtctggatttcggcggctgccgcctttcgctggcaacgccggttgatgaagcctgggatggcccactctccttaaacggtaaacgtatcgccacctcttatcctcacctgctcaagcgttatctcgaccagaaaggcatctcttttaaatcctgcttactgaacggttctgtcgaagtcgccccgcgtgccggactggcagatgcgatttgtgatctggtttccaccggtgccacgctggaagctaacggcctgcgcgaagtcgaagttatctaccgctcgaaagcctgcctgatccagcgcgatggcgaaatggaagaatctaaacagcaactgatcgacaaactgctgacccgtattcagggtgttatccaggcgcgcgaatcaaaatacatcatgatgcacgcaccgaccgaacgcctggatgaagtcatcgccctgctgccaggtgccgaacgcccaaccattctgccgctggcgggtgaccaacaacgcgtagcgatgcacatggtcagtagcgaaaccctgttntgggaaacgatggaaaaactgaaagcgctgggtgccagttcaatcctggtcctgccgattgagaagatgatggagtgatcgccatgagctttaacacaatcattgactggaatagctgtactgcagagcaacaacgccagctgttaatgcgcccggcgatctccgcttctgaaagcattacccgcactgttaacgatattctcgataacgtgaaagcacgcggtgatgacgccctgcgggaatacagcgcgaagtttgataaaaccacggttaccgcgctgaagatgtctgctgaggaaattgccgccgcctgcgaacgcctgagcgacgagctaaaacaggcgatggcggtggcagtaaagaatattgaaaccttccacactgcgcaaaaactgccgccagtagatgtagaaacgcagccaggcgtacgttgccagcaagtcacgcgcccggtggcttcagtgggtttgtatattcctggcggctccgccccgctcttctcaacggtattaatgctggcgactccggcgcgtatagcgggctgtaaaaaagtggtgctgtgctcaccgccgccgattgccgatgaaattctttacgcggcgcagctgtgcggcgtgcaggacgtgtttaacgtcggcggcgcacaggccattgccgcactggcgtttggtacggaatctgtgccaaaagtggacaaaatcttcgggccaggcaacgcctttgtcaccgaagcaaaacgccaggtaagccagcgtctggacggtgcggcgatcgatatgcccgcaggcccgtcggaagtgctggtcattgccgacagcggtgctacgcctgatttcgtggcttctgatttgctctcccaggctgaacacggcccggactctcaggtgattttactgacacccgctgctgatatggcgcgtggcgtagccgaagctgtcgaacgccagttggcagagctgccgcgtgccgaaaccgcccgtcaggcactgagcgccagccgtctgatcgtgactaaagatttagcgcagtgcgtagagatctccaaccagtacggcccggagcacctgatcatccagacccgcaacgcccgcgatctggtcgatggcatcaccagcgccggttcggtatttcttggtgactggtcacccgaatcggcgggtgattacgcctccggcaccaaccacgtactgccgacttacggttacaccgccacctgttccagcctcgggctggcagatttccagaagcgtatgaccgtgcaggaactgtcgaaagaaggtttctccgagctggcttcgaccatagaaacactggccgccgccgagcgcctgaccgcccataaaaatgccgttactttgcgtgttaacgcccttaaggagcaagcatgagcaccgtgactattaccgatttagcgcgtgaaaacgtccgcaacctgacgccgtatcagtcggcgcgtcgtctgggcggtaacggcgacgtctggctgaacgccaacgaataccccacaaccgtggagtttcagcttactcagcaaacgctcaaccgctacccggaatgtcagccgaaagcggtgattgaaaattacgcgcagtatgcaggcgtaaaaccggagcaggtgctggtcagccgtggcgcggacgaaggtattgaactactgattcgcgctttttgcgaaccaggtaaagacgccatcctctactgcccgccaacgtacggcatgtacagcgtcagcgctgaaaccattggcgtcgagtgccgcacagtgccgacgctggacaactggcaactggacttgcagggcatttccgacaagctggacggcgtaaaagtggtctatgtttgcagccccaacaacccgaccgggcaactgatcaatccgcaggattttcgcaccctgctggagttaacccgcggtaaggcgattgtagttgccgatgaagcctatatagagttttgcccacaggcatcgctggctggctggctgacggaatatccgcacctggctattttgcgcacactgtcgaaagcttttgctctggcgggccttcgttgtgggtttacgctggcaaacgaagaagtcatcaacctgttgatgaaagtgatcgccccctacccgctctcgacgccggttgccgacattgcggcccaggcgttaagcccgcaggggatcgtcgccatgcgcgaacgggtagcgcaaattattgcagaacgcgaatacctgattgccgcactgaaagagatcccctgcgtggagcaggtttttaactctgaaaccaactacattctggcgcgcttnnaagcctccagcgcagtgtttaaatctttgtgggatcagggcattatcttacgtgatcagaataaacaaccctctttaagcggctgcctgcgaattaccgtcggaacccgtgaagaaagccagcgcgtcattgacgccttacgtgcggagcaagtttaatgagtcagaagtatctttttatcgatcgcgatggaaccctgattagcgaaccgccgagtgattttcaggtggaccgttttgacaaactcgcctttgaaccgggcgtgatcccgnnnntgctgaagctgcaaaaagcgggctacaagctggtgatgatcacnaatcaagatggtcttggaacacaaagtttcccgcaggcggattttgatggcccgcacaacctgatgatgcagannnnnacntcgcaaggcgtgcagtttgatgaagtgctgatttgtccgcacctgcccgccgatgagtgcgactgccgtaagccgaaagtaaaactggtggagcgttatctcgctgagcaagcgatggatcgtgccaatagttatgtgattggcgatcgcgcgaccgatattcagctggcggaaaacatgggcattaatggtttacgctatgaccgcgaaaccctgaactggccaatgattggcgagcagctcactaaacgagaccgttacgcccatgtagtgcgcaacaccaaagagacgcaaattgacgtccaggtgtggctggatcgcgaaggtggcagcaagattaacaccggcgttggcttctttgatcacatgctggatcagatcgccacccacggcggtttccgcatggaaatcaacgtcaaaggcgacctctatatcgacgatcaccacaccgtcgaagataccggcctggcgctgggcgaagcgttaaaaattgccctcggcgataaacgcggtatttgtcgctttggttttgtgctaccgatggacgaatgccttgcccgctgtgcactggatatctctggtcgcccgcacctggaatataaggccgaatttacctaccagcgcgtgggcgatctcagcaccgaaatgatcgagcacttcttccgttcgctctcatacaccatgggcgtgaccctgcacctgaaaaccaaaggtaaaaacgatcaccaccgtgtagagagcctgttcaaagcttttggtcgcaccctgcgccaggccatccgcgtggaaggcgataccctgccctcgtcgaaaggagtgctgtaatgaacgtggtgatccttgatactggctgcgccaacctgaactcggtgaagtctgccattgcgcgccacggttatgaacccaaagtcagccgtgacccggacgtcgtgttgctggccgataaactatttttacccggcgttggcactgcacaagcagcgatggatcaggtgcgtgagcgcgagctgtttgatctcatcaaagcctgtacccaaccggtgctgggcatctgcttagggatgcaactgcttgggcggcgcagcgaagagagcaacggcgtcgacttgctgggcatcattgacgaagacgtgccgaaaatgaccgactttggtctgccgctgccgcatatgggctggaaccgcgtttacccgcaggcaggcaaccgcctgtttcaggggattgaagatggcgcgtacttttactttgttcacagctacgcaatgccagtcaatccgtggaccatcgcccagagtaattacggcgaaccgttcactgcggcggtacaaaaagataacttctacggcgtgcagttccacccggagcgttctggtgccgctggcgctaagttgctgaaaaacttcctggagatgtgatgattattccggcattagatttaattgacggcaccgtggtgcgtctccatcagggcgattatggcaaacaacgcgattacggtaacgacccgctgccacgcttacaggattacgctgcgcaaggtgccgaagtgntgcatctggtggatctgaccggggcaaaagatccggcaaaacgtcaaatcccgctgattaaaaccctggtcgcgggcgttaacgttccggtgcaggttggcggcggtgtgcgtagcgaagaagacgtggcggcgttactggaagcgggcgttgcgcgcgtggtggttggctccaccgcggtgaaatcaccagaaagggtgaaaggctggtttgaacgcttcggtgccgatgccttagtgctggcgctggatgtccgtattgacgagcaaggcaacaagcaggtggcggtcagcggctggcaagagaattcgggcgtttcactggaacaactggtggaaacctatctgcccgtcggcctgaaacatgtgctgtgtaccgatatctcgcgcgacggcacgctggcaggctctaacgtctctttatatgaagaagtgtgcgccagatacccgcaggtggcatttcagtcctccggcggtattggcgacattaacgatgttgctgccctgcgtggcactggcgtgcgcggcgtaatagttggtcgtgcattactggaaggtaaattcaccgtgaaggaggccatcgcatgctggcaaaacgtataattccgtgtctcgacgttcgcgatggtcaggtggtgaaaggcgtacagtttcgcaaccatgaaatcattggcgatattgtaccgctggcaaaacgctacgctgaggaaggtgcagacgaactggtgttctacgatatcaccgcttccagcgatggccgtgtggtagataaaagctgggtatctcgcgtggcggaagtaatcgacattccgttttgtgtggcgggtgggattaagtctctggaagatgccgcgaaaattctttcctttggcgcggataaaatttccatcaactcgcctgcgctggcggatccgacgttaattactcgcctggcggatcgttttggcgtgcagtgtattgtggtggggattgatacctggtacgacactgaaaccggtaaatatcatgtgaatcaatataccggcgatgaaagccgcacccgcgtcactcagtgggaaacgctcgactgggtacaggaagtgcaaaaacgcggtgccggagaaatcgtcctcaacatgatgaatcaggacggcgtgcgtaacggttacgacctcgaacaactgaaaaaagtgcgtgaagtttgccacgtcccgctaattgcctccggtggcgcgggcaccatggaacacttcctcgaagctttccgcgatgccgacgttgacggtgcgctggcagcttccgtattccacaaacaaataatcaatattggtgaattaaaagcgtacctggcaacacagggcgtggagatcaggatatgttaacagaacaacaacgtcgcgaactggactgggaaaaaactgacggacttatgccggtgattgtgcaacacgcggtatccggtgaagtgttaatgctgggctatatgaacccggaagccttagataaaaccatcgaaagcggcaaagtcaccttcttctcgcgcactaaacagcgactgtggaccaaaggcgaaacgtcgggcaatttcctcaacgtagtaaatattacgccggactgcgacaacgacacgttactgttgctggcgaatcccatcggcccgacctgccacaaaggcaccagcagctgcttcggcgacaccactcaccagtggctgttcctttatcaactggaacaactgctcgccgaacgcaaatctgccgacccggaaacttcttacaccgccaaactgtatgccagcggcaccaaacgcattgcgcagaaagtgggcgaagaaggcgtggaaaccgcactggccgcgacggtacatgaccgctttgagctgaccaacgaggcatctgatttgatgtatcacctgttggtgctgttgcaggatcaggggctggatttaacgacggtgattgagaacctgcgtaaacggcatcagtgagttgagggataagcggatgcgatgttgtcgtcgcatccggcaaaaaaaacgggcaaggtgccaccaccctgcccattttctttaaaaccgaaaagattacttcgcgttgtaattacgcagagcattacgccccaacacaatccccgcgccaaccatgccgcccagcagcaccgccagaatcaaggtgattgcctttttcgggctatcgcgacgaataggtaacgtcggtttcattacataacggtaagcatgaatatcaagatcatcaacttttaagctttcgatatccagcaggttttgacgagtctgatagtagtttggtgagaacaccaacggacgggtcgcctcatgcttaatcatcgactccagcgcttcgctccccaaaaggaacaacgtatcttgcgtgatatcttcgccagtctgttgaatttgcggttttgtcacctgcgcctgattcgcatactgcaacgcttcctgaatctgacggatacgcagatctttctgctcctgcgcaaccacttcctgcgttcttaaagagtcctgcaagtttttccgtcccagagcaatgatgtctttgagatccttttctagctcttgattcactttatcatcaacttgctgaatgtattgggccaacttcatttgtgctccctctgcagtttgcccaacataagaaacagtcaatggtaattgctggttcttaacagaaggttcgatggtaagtttttctggttcttcctgattatccagcgtttctgctaatgcagagaaggcagaactgaagcgaccaattaacgtctcctgtaaatccgatactttcggtgcagcctgaccatagataacattcacggcattgttatagccagcaatttgtcccacgtcgggctgagtgataattgctgttgacgtccatttctccttcgctactgccaaatatccaatagccagggcaatagccacaatgacggaaatgatgattgtcatcttgccacgccacaactgcactagtaaatcaatcaaatcaatctgttccgagtcatggttttgcccagaaacattattattttctactctcatcattaccctaacggacgaaataattttaagtcgccatagtttagcgataatcgccatgaatgctataggataaatgataaaaataatgaattattacaaagggaacataagagaatcagggcgaaaatcgccctgataacaggatgttagtcactgccaaagagatcgcgggtgtataccttatctgccacatcactaagctcttctgccatacggttggaaataatgacgtcggcttgttgtttgaaggtggcgagatcacgttccaggcgagagttgaagaatgaatcttctttcatcactggctcgtagatgatcacttcaacgcctttcgccttgatacgtttcataatcccctgaatagaagacgcacggaagttatctgaaccgctcttcataatcagacgataaatacccaccacttgcggtttgcgtgacaaaatggcatcggcaataaaatccttacgcgtgcggtttgcatcgacaattgccgagatcaggttattcggcacagactgatagttcgccagtaactgcttggtatctttcggcaagcaataaccaccataaccaaacgacgggttgttgtaatggttgccaatacgcggatcgagacaaacgccttcgataatctggcgagtattcagacctaaactttctgcgtagctatccagttcgttaaagtatgccacgcgcatcgccaggtaggtgtttgcaaaaagtttaatcgcttctgcttcggtcgaatcggtgaacagggtcgggatattttgcttaatcgcgccttcctgtaacaacgcagcaaaacgttctgnnnnttctgaacgctcaccgatgacaatacgtgaaggatggagattatcgtaaagggctttaccttcacggagaaattccggagagaaaataatattttcagtacgatatttcttatgcatcgcttcggtaaaaccaacgggaaccgttgatttgatgaccataaccgcataaggatttatctcaactacgtctttaattactgattctacactggatgtattgaaataattagttttaggatcatagtcggttggagtggcgatgatgacataatcagcatcccggtaggcttcatttttatctaatgtggcattaaagtgtattttatctgattgcaaaaactgctgaatttccttatcaacaataggagatatccgatcattcagcatagcaacgcgtgacggtaaaatatctaatgccacaacctcatgattttgtgcgattagaagcccgtttgataagcctacatagccagtaccggaaatggtgattttcatttcatgctctcagaattaacttaactgtgaatcatgatgtttttagcatcctgataagagctaaaagttttaacgctacgttgttcgatggtcaacgcaacgaaaaacaattcagattttctttataaanntagctnntatttattaagttaatattaagccgtgaaatttagtttataagataattggcaaataaatatcctccaccatagccggaggtttttcaaatgcgcctataaggctatcttaccaaccacgccctaacaggcgcacacgatctgacatttgcatccaacttcgttacagggcaagcttacgaaagcccgcaccccgcaaggactgacgcgagatagtctctgtccatggctgcttttctcatcttacgtcttaaccctgccttgaataccttatcattcgtcaaaatattaatgcaatgtgccgtatccctgaaaataattcggctgcatttcctcttcttattttgcagtcgtcttcattcattaccacgtccagacgccagtgcaacttattctccacgtgccagtggtttcggattgctgtggcgaacttctctgcggttaaatcagcagaactgatataatatctgaccgtcatttctggctctttcttttgttctgctattatggaccgaaaggagactgccacgcataatttcttcagccctttccattaaaacgtgaaatcaataagttcatcagggacatcgcaaacaatatgaagacggatttcttctctgccgtgacttttttcactaatatctttctggcaccccatcgcatcagttttgatgatttttccattaatgtccagcatgttaagaatttccgggatagctgtaatctcattagatttctcatccgtcttgatctgtccgatgaccagactgtgcattgttgagaacgcactaatggcatgaatcgctcccctgcggcgactcttgtcataagagtgctggagcgtttttccatcaattgcaatgacgtctttatcatctgaagaatggccgtcacgcatccagttaataaagcactcgtgaaattttgcaggactgatacaggatacaactctggcaatggtatcgtgaacaggaataccattttcaaaatcaccatattgcttcaaaaaatcgagatgtgattccccaaaatcctctatatcttcccaaccttctgcaccagaaataacggcacaaatagtcaacagtagaatatccgataatttatgttccattttccaggcttgtctgtaatcggggataatagaaatatgctccatcaattttttaagttccactttgttctccttaattatgtaaggagtatttgatcatgtataagcaataaaaaacagcttcaggtgatgaggaatatctcaatttttgaacataaaatgcgaattatttagtacaaaaaagcagcgttacatgatctttccctgcctctgactgagagtttactcacttagccgtgtgtccactattgctgggtaagatcagttttctgtgcacaaaaaagcccggaggagcgctccaggcctagattcacagtaagactaaaccagattaatctagctatgccatagcaaccatgatttcttcaatgccacaattaaactgcataaattctcaagtaaccatattgctactgtatctagtcataaaacaaacttccagctagacgtattaaacgcaacagctataaaatgccgcctctaacttgcgctggcaaaaaatataaacaactatctatagacagatagagttcgtaacttaaactataatattagtgtttataacagctattgtatggataaactcaatataatctaaataaatggaacgtattcaaataaaaattacccataagcattaaatcaagagtcattcactttttatcatttcaaaacctctctgagataatcaatctcatcaaatagttctatctgatgatttccaacaaaaagaccatttttatctaaatactcagcgttatctacattgttatgaacggtatagtcgaaatatttaagaacatctgtatttttcagaaagttaccagtgacaattggtctacactcaataccagcagaatttaaattttcaacaagttgtttcctaatgacaccagaatctttttttatgataaatgagaaaccaaaccagctactctcgccagtttcctgctgcacgtccaagtatggatgatccttaaatttatcaagaaaatactctgcattttttcttctaacagaaataaatcttggcaatttttttaattgttctatgcctattgcaccactcatttccaatggcctaacattatagccgggtaaaacgaatttgaatgactcttcaaattgatcatcactcttcacacctgtaactttattttttttcggtaaattacgcgtccaaccatgagctcgaatgcacagcaagatatgataaatttcttcatcatcagtgacaatgcatcccccttccatggtagctatatgatgagaatagaaagagctaaatgttcccatcagaccaaaagtgccggcgcatttattattaaaggttgctcccatagactcacagttatcttccaataagataatatctctacctccaataattttattaatttcatcgaagttattaggattacctaataaatttaccgtgagtattgcttttgtactatctgttacagcttctttcaaactttcaatatcaatatttaaggtattannatcgatatcaacaaacttcaccctcaatccatattgttgcaacggataataagtagttgaccaagaaacagcaggaactattatttcatcccccttttttaatctnnnntnntttgtgaaaaacaatgcagcaatcattaataaatttgctgtagaccctgaactcaccatcacggcatatttacttccaaaagtctttgcaaattgggtttcgtattgttttacatactcccccatcgtgaacattttagagtctaaaactgattggattgctttatattctaaatcatcccaagtgctacttgctaatgggtagttaatcatttatacacattctccaaataatacttataggtttcttttataccatctctcaattcaaactgatatttccaaccaaactcactcagcaaggtaatatcaacaagttttcttctcataccaacaggctttgttaaatcatgagtaaaactacctttatatcctatttcttcagctataactttataataatcattaatcgagaaatcatgacctaacccaacgtttaacatacatggtaatcgctgaatatttggaatcgcttggtaaataaaattcgcaaagtcttcggcatacataaattcacgacgggactcaccgtccccccaaatttcaatcaattttatattattaactttagcattatgtattctatttataacagcaggaatcatgtgtgaggaatgctcatcaaacttatcatatttcccatataaattacatggtataatcgttttataatgataaccttcactctctttagttatatactcgcacaattttgccactgtgattttagcaagtgcatacccttcattagtgtgttctaacttacctgtaagcaaagcatcttcagaaattgcagtgtcaatacctttagggtacatgcaagagcttcctaaatttataaagttcttaacaccacaatttttagcctcatttacaatgttaacacccattttcaggtttgagacaagaaaatcaacagggcgttttatattcgcttgaattccaccgactaaacctgccgcatgaataatcaaatcaggagaatgacatgtgatgtagtcatgaacagctttattatcaagcaaatttagctcagaactagtcgggcataatagctcatacttgtttgaattattattatcaacaatattacgaccgaccatcccagttgagcccgtcaacagaattttcatatgacctctaacatataacctgatgaatatatctaacttaaagatttcaaaatcgcgatccgtgacatcattagctcctcttaagatcgcaaatttaagattattgcatcgttattctagccattctgtatgaaaaacaccttctttatcaatgcgtttatacgtgtgcgcaccgaaataatcacgctgtgcttggatcaagttagccggcagaaccgcagaacggtagctgtcgtagtaagctacagcggcggagaaagtcggtaccggaataccgttctgcacagcataagacactacatcacggagggcttgttgatattcatcagcgatatgtttgaaatacggagcaagcagcaggtttgcaatatctttgttttcagcataagcgtcggtgattttctggaggaactgtgcacgaataatgcagcctgcgcggaaaattttcgcgatttcaccgtagttcaaatcccagttgtattgctctgatgcggcacgaagttgagaaaagccttgggcataagagacaattttgcctaggtacaaggcacggcgtactttctcaacaaactcagctttatcactagccagtttagcctgcgggccagacagcactttagaggccgcaacacgctggtctttcagagaggagatgtagcgggcaaatacggattcggtgatcaacgacagcggttcgcctagatcaagagagctctggctggtccatttgcctgtacctttgttcgcagcttcgtccaaaatcacatcaaccaagtatttaccctcttcatcttttttgttgaagatatccttagtgatgtcaatcagatagctgctcagctcgccttcattccattcattaaagatagaggctaactcttcattagacagatttagggcacctttcagcagagaataggcttcagctatcaattgcatatcgccatattcgataccgttgtgcaccatcttcacgtaatgacctgcaccatccgcaccaatatacgtcacgcacggttcaccatcttcagctatcgcggcaatcttggtcaggattggcacaaccatttcatacgcatctttctggccaccaggcatgatagatgggcctttcagcgcgccctcttcaccacctgaaaccccggccccgataaagttaaagccttccgcggaaagttcacggttacgacgaattgtgtcctgaaagaaggtattaccgccatcaatgatgatgtcgcctttatctagatagggcttcagggaattaatcgcagcatcagtgccagcacccgctttgaccattaacaggatacggcgtggagtttcaagagactcgacgaactctttaaccgtgtaataagggaccagtttcttacctgggttttcggcaacaacctcttcagttttttcacgcgagcgattatagacggatacggtataaccacggctctcgatgtttagagccaagttgcgccccatcacagccataccgatgacgccgatctgttgcttggacattacatactcctattatttatctttaaccagctaatgtaaatactttaattcaatattattccaggtaaaaatactggcttcatttataacttccggataaaaaccacacataatctacgaataaatttaataaaagaccaagatatggcaaaaaaacagatccactttcctttaagatttttatttatcgaagatatctcaccaagttgcatcttgatcaaatttgaactgagcccagagtgtccataacttggtttgccaagagatattaatggtgttttgacataacccattatacatttatctttagctaaccttagccataaatcatagtcttcagaaaatctttgtaattcattaaagcaaaccaaattccttttcattattactgatggagttgggaaataattcttgaacgcaaggttataaagatttataatttcgaactgggacacagtgcttggattatcattagtattaatggtaaatgatgcaccaatgaaatccaacccatatttatccatcaactcaatttgaatatttgttttattaggaaaccatatgtcgtcagcatctaaaaatgccacaaactcgccagaacaaaagcgaacacctttatttcgacttgctgccggacctaaattaatgtcattcttcacaagctttacgaaagggtgatttgttttaatatgttcatacgtattatctgtcgaacaatcatcaacgcaaacgatctctataaatttgtagtcttgatcgtatactgattgcaatgctttatctatagtttgaatgcaattaaagcaaggaataacgacacttattgttttcacaatcaatatctcactttatgtatttacagtatataaaagaagcaatagttctaatccctccgaagagatagttgatattacctgtcaaaaaaaagcatttcatctttattaccaaatcatttaccataaccatatacaagttttttttagcagttgactgaccttcatgcaacctgtaatagaataaatattccggtaaattttgaaattttatttttgctaaacttaatctattccataactcataatcctcagaatagtttgaaaacatataaccgccaattgaagcgattactttcttcctaaacattacagatggatgaacaatgcaacatttatacggtaagttttttacaatatccaaattttcttcaggtagctttgttttgtttatttctcgacctttatcatcaataaatattgcattagtaccgacgacatccacataaggattattttttaannaatcaacttgtttcgtgaatctatcaggatgagaaatatcatcggaatccatccttgcaataaactcaccattggacaaatcgatggctttatttaatgagtacggtaaataagcaatatttgtacgaatcaacttaattttgtcattaactttgtgtttcaactcattataaaaatcatccgtacaacaatttgcaactattattatctcgaatgacgaaaatgtttgcgataaaatactatttattgcctcatcaagaaaagggttttttttattaactggcagaataacagaaacaacaggatgagttgattcggcagattcagcttcatcgattatcataacaatatactctctttccttttaaataaccataacagtgatataaataattgaattaacgaacataacacccaacctatacctcccgctaaaaccccaactctagtagataaaagccaaattgttggaaatacacacagtaacgaagagatattgatacacagtattactattgctttttgttttattaacataatctgataaattatgttataaatagagtttnnnncaannnnnnnnnnnattaaccgcaatggccaaataattatagattctgcttcagcattatcaagccataaacttaggaaaaatggagaaatcagaaccataatgagacaagggaaaacacaaaatataattatgctnnnnnnnnnnnnnnnnatattttgtttattcaaggccactgtcaatcgtgggaaaaagagccttaataaaggatattgtaactgaagaaaatattgagccaacgtagatgccaatacgtaatacccaaaatcactaatgtcaacatatttactaagaacaattctatcaagctgtgtaactagcaatcctatagctacagcgattgataaaacaccactttcacgaaaaattttatttatgccaattgatagtttttcctgccttttaatattgccatcaaaactaaaaagtatttttatagtattacttgtggattccagaaaagcaatcaaaagaaaaccactttgatataagattgcctgtggccacttagttacaagacaaatagcaacaatgtgttttaatgtaaaaaaaaagcattgtcttatatttgatttatgctgttgcaatgttccattccagtaacctatattagcattgttagggaactgaaataaaaactgcaatcctaacaggacaacgcaaataaaaacctctttctttaaggaaaaatccaaaactaaccaaaagtcaatgatgaaatagctccccactaaaatcaatgaaaacacaataatagctaaaagcgaatatgcatgtagaaaagacttatagattacataaagttctctagacttaccattacatcttgcaatatctcttggcattatttgggacatgccagcgtctgccaaatacattaatgattgtatagatatacaaatagcaactataccccattgctggggaccaagaatgtggagataatatggcagaacaataatactaactccccccatccatgccacacaaatataatttgatatcccattcttaataaagcctgaagaaaacattttnntnnnnatacataaaaatctctttattaaggatgccctaatnnnnnnnnnntaaaaatcaatctaaaggtcggtattatcgataatgttatccccaaaagcaccacgctatcttttttcttaatattagacaatataattgcagtacccaatatcgccgcgggaacaaaaacccgccaggaaagctgccaattatcacataaaaatnntgataatatacaaaaaaacaaagagagcttatataacacccaattattcgtctcactctctaagtttatcattaataataaaaacaagaaagttccgctaataattagacgttttaaagcttcattatcttgactcataaatagagacaactccccccccgacacaaataaggaagcataactcatccaatataaaaagtttgagataataaaggagataattatagatacaattacgaatttaaatttacctattttatttacccgacaaaaataatatacacaaagaaacaatataaaggtataatgaaacaataaaccgagaccaataaaaataattttcttatattttgtttttgaatagatcatcaatacaagaaaatataagcagataatactgcgccacacataaatgttattcgaaaaaacataataagacattagcattagtgtaacacataacaaacttgggctaattctaacctcatcatttattttaagatatattaaaacagcaagaaaattcaccaaaaacaaatttagaagaataaatacaaaccgcccctcccccaaaaagccctgcaagtaaaaaaataatcccataccaatttcaaatttattggtttgatgataaatagaactcaacccctccagtaatccattattccaaatataaatagcttgttcataataaacaagcgagtcgtcaaaaccaccctgaatagacagaggtaaagaacatagtaatgataatactcctccccaaattatcactacatattttttattaaacattagtacgactcttatttttcaattcgaacccatttctctgggcatggatcaaaactattaagttcttctctctcaaaccaaggcgttggcgcaattgtaatacctagatcatagttttttagccacgccccccaccaactaaatgaactattagctattatatgatatttagcatttgacattaaccacatatctacctcttgagtattcccttcaataaacttcacatcatcactccttgaaaatatttcattttnntatttcttacaccattcgatatcatcactaaatacaaaaaaaaccaagttattaaacctttcctttaaataacgaatgctgtcaatataatatctttcagtacacaacccatgtatttttaacgcttcgacgttcgatacataatctccgcggcgtatatgcacggagactgaattggtgcatcgaattacatcacttaattctttagcatccaaatttatattgataggtgtaaatatctctcttaatttttctttatgctctaaaaaatacctctcattttgccaaaaacctataaactccacacttcctttcatgctgccatttatcttctttgagtattgctctgactcaaaccttttgctacataaagataattttggaaatttattaatggcacgcactatgaaattagggaagatacacatttctttctttgacatgacaaatgtattatctatattcaacttatctaaacgaaaaccaccatgtagtgtatagtttttataccccctcaaatctaatttaagagagctatttcgctcaactgactcagcataacctttcgcatactggaacatctgatttcctaagcctccagccaagcgtgcaaccacgatactcatttattatctccggatgttaatatattcaatatcgatttagtcattttaattacgatttcactatctcctttcgattccacattcaggcgcaccaccggttcggtattggaagagcgtaaattgaaacgccagtcgacaaacgacatactgataccgtccgttctgtccaccgacagcgcctcatgagaaaaatactgttccacacgctcaattgctaccttcggctctgccagcgtacggtttatttctccgctcgccgggtaggccagcatccggtcatggatcagttctcccagtgacagtcctttcagacacagcaattctgctaccagcaaccaggggatcattccgctgtcgcaataggcaaaatcacggaaatagtggtgtgcgctcatttcgccaccataaatggcatcttcgcggcgcatgcgttctttgataaacgcatgcccggtttttgacatcaccggtttaccacctgccgccgtcaccacatccacggtattccaggacaggcgcggatcgtggacaattttctccccgggatacttctccagaaacgcttctgctaacaggccgacaatataatagccctcaataaactgacctttttcatcgaacaggaagcagcggtcaaaatcaccgtcgaaggcgactcccatatccgcgccgtgttcaatcaccgcattgcgcgtatcagcccggcactccggcagcagaggattaggaataccattggnnaaatttccatccggcgtgttgtggattttgatgaactcaaccggcactcccaatgccttaaaacgggcttcaatagcatcaaccaccggacctgctgcgccgttacctgaattgaacaccagcttcatcggtttcagtttggcgggattgatgtaacccagcaggtggtcaatgtaggcatcgcggatagtaatgcgctggtacnnggccacgttttgtttcttcaataacagggaaatcatttaattccgccaagcgctgcacgtcgcgcagaccggtgtcaccgctgatgggtcgtgccccctctcgcaccagcttcataccgttgtaatcaatcggattatggctggcagtcacttcaataccgccatcaatatccaagtgaaaggtggcgaagtaaatctcttcggttcccgacatgcctatatccagcacatcgacgcccgcatcctgtagtcctttcgccagcgccaactttagcgtctcgctggtcaggcgcgcgtcaccgccgaggacaatcgtttttggcttaaggtactcgccgtaagcgcggccaattcgccacgcgatatcttcattcagctcttcgcccagcctgccgcgaatatcgtaggctttgaaacaagttaatttattcatggttaatcttctttttatatctttctttctgcctgacaatatcatcttcaccaagataatcaccagagcttacttctattaatattaatggtataacacctggattttctaaactataggatgccccaagaggaatataaattgattcatttaccgtaattagcttttctgtacctcaagaatgacttttgctgtgccagacaaaacaatccaatgttcagaacggtggtgatgcatacgcaaagaaagcccttcgccgggtttcactactattttttttacagtatatctgtcaccctgatctatagagtcaaacttcccccatggtctaaatacttctctatgagtaacatgctctgtgcgattgttttttttaaggagatcaacgattttctttacatcttgaacctcagatttatttgctactaatactgcatccttagtttgcactatgacaatattctcaacacctacagcagcaactagcgcagaatcagagtaaatataattattttttgtgttgtatgttaaggtatcacctttacatacatcacctgatggacttttatcactgagctcccataatgattgccacgagccaacatcactccatccgatatcaacaggacacacaacacaacgttttgtgttttccattacagcaaaatcgattgactcagaaggacatttctcaaacattctctcaggtagacgtataaaatccaaatctttagatgatgccgatatggcttcttcgcatacttcaaaaatatcaggccgatattttttcaactctgataagaagactgaagctttgaacataaacatcccgctattccataaatatttnnnnnnnnnnnnntatttctcagcaagttcacgttcaggtttttctacaaacttttttgccacgtaaaaatgagcgttatcaacttcgatattagattcaactctcgctccaatatttatgtaaccatatcccgtttcagcataagttggtattataccaaaagtgacaattttatcttcttcagccataaacatagccgattttatcgcttcacaaaatgcttcttcattttttattatatggtctgcagcgagcactaataagatagggtctttatttttatcacgcttaagggctgaaaaagcggctaaagcaatcgctggtgcagtatttttgccacaaggttcgagtattatattaccactaagttgattcatctgccttaactgctctgctacaataaagcgatgattgtcattagtaataaccaagggggcatcaaatgataatttagaaagtctattcaacgttgactgaagcagcgataattcaccaccaatttttaaaaactgtttaggatataactcacgtgatagcggccataatctacttccagtccctcctgccataactacagctatgaatgacttatcagacatcacatgcccctttatcgtttaatccaacaaaattattatcagttctaaaataagcacgagtattttcatgtacttcattgcaagtcaatgcaagttctggagaaaaccatttccactcatcatgctgtaatttaggaagttgtatattcgatagtaaaagttttattttaaaggcaataacaacatagtgtgttgaaaaatttnnnnnnnnnnnatnntctttataaaaatgttgccaaacaccataaaaagcccccagcttaatatctattttaacaccaatttctttccagttatccggcaaaaagcttgcttgaatgtctcattcttatatatcctccctccgggaacaaaccaatatccctgcgcaggtctattacatctcttgcctagtaaaaattcaccatattcattctcaattatcaggtctattgagattaatggcgcataccgtacgactgttacaagatcctcatagtctaacaatatcctgaccccattatttaataatcaatccagcactatatgtttagtacaaaagaaacatttcatacttaacaactagtaaactgtattcttatttgtggaatttgccacttggcaaattccacatccaagatgatacgaagttagtttgttactcttgggctaaattggcattaaaaccgtgcgatttcaacagtacgtgtttttttgctgtctgcaaatcattagcgaccatttctgagatcatctcacgtaaagtaatttcaggcttccagccaagtttttcatgcgcttttgctggatcacccaacaatgtttctacttctgccgggcggaaataacgcgggtcaaccgcaactatgacgtctcctgttttgacgccaggtgctttatcgcccgtcacggaaacaacaatacctttttcatctacaccttttccttcaaagctcaatttgatgccaagttgctctgcagtcatttccacaaactcacgtacagagtactgaacaccagtggcaataacgaaatcttcaggttgttcctgctgtagcatcatccactgcatcctgacataatctttagcatgtccccagtcacgtagtgaatccatattccccaagtaaaggcaagactctagcccctgagcaatgttnnnnttgcacgggtaattttgcgcgtaacgaaagtttcgccacgacgcggagattcatggttaaatagaattccgttacaagcatatataccgtaagactcacggtagttaacggtgatccagtaagcatacagtttggctacagcatacggtgaacgtgggtaaaaaggtgtcgtctctttctgaggtatttcttgtaccagaccataaagttcagatgtggacgcttgataaaagcgtgttttcttctctaagccaaggatacggatcgcttccagtaggcgtaatgtaccaatagcatcaacatccgcggtatactctggtgattcaaatgacacagccacgtgactcatagcccccaagttgtagacttcatccggtttaacttcttgcagaatacgcgtaatgttggaagtatccgtgagatcaccatagtgcaaatggaagtttggcttggctgaatgcggatcttgataaatatgatcaacacgttcagtattaaacgacgatgcacgacgcttaataccatgaacttcataacctttttccagcagaaactctgccaagtatgatccatcttgtccggttacaccagtaataagagcaactttagtcataaaaaacctatattataaaatcaattatttaaatataacgactctaatattttagtccgttttgttaggtcgaaatcttctattagtgcctgatacgctttatgtgcgagattatttctaagttcaggatttgcgtgtaaaacattaatttttcgtttcagatccttgctatcttcatccttaaaaacgacaccagctgttttttcaataagatatttatttgcttcgatatctgaggatagcacaggaacttttgccgccattgcctctaacatcgctaagggcatcccctcccatctagacggtaagacaaaaagatcatatttatataaatgttcttctacagcatctatccagcccaaaaaacttactttatcggcaatgttatattgatttattttctctaatagcttgaccttgagtggaccatctccaataatatctacatggatattggattccaaatcctttattgcctcaattaatagcaatggatttttttggtcacataatcgtccaaccataacaattttaaaaatatctttatctttatctttatctttattgtatttatcgacatctattgcattgttaattnnaannnnnnntgattttttatttttaacaaaatattttcttgcgattctttcatcgctctcattcatgactataatgatattggaacaataagaggctatcaactccatcaaaaagtatataaacttaataagcttgttttcagttgaaggaaatgcgaagccgtgaaccgtatgcactatttttttcgtaccagctaattttgcagcaacacgcccaagaaaacctgttttagaggaatgagtatggacaatatcaaatttttctttttttattattttatataattgaaatagagatgcacaatctttaaataatgaaatttccctggtcaaagttggaattatatgtgtgcagactccaaaacaacgggcctgctcagctaatcttccctcctttgaacaaaccatcgattgttgaaattcttgacttaaagtatgcatctcatcaagtgaaacacgttgagcaccactaatgtcaccactcaggtgcacatgcagaatttttaccataataaatataatccaaattcatggtcattctataaacactgataacattcagtacgttgtagcgataaagaacaaaccttatacacttaattttattcaaaaaaacatcacgctaccgcccctggcttaacagctaccagattactgttctcataccaaaaatttaaagcacatgaagcactcaaaccacatggttggccgcaattatctaaccaatttcagttagaaacaagtgtaaaactgttcaaaatctagttaaggtcaatatctgcacaatgcaatttatttgacataaaaaatagtagtaacatcccaaactttaccacagagatattaaaagcccccatcgttaaacttgctttcacatatgtgctacataattatttagcaagtaattgctcaatattcttgagaaatttcgcaccttcctttaggttgcgcagcccatacttcacgaacgcctgcatatagcccatttttttaccacagtcgtagctgtcaccagtcatcagcatggcatcaacggactgttttttcgccagttcggcaatagcatcagtcagctgaatacgcccccatgcaccaggttgagtgcgttcaagttccggccaaatatcggcagaaagcacatagcgaccaacggccattatgtctgagtccagcgtctgcggctgatccggtttttcgataaattcaacaatgcggctgactttaccttcacgatccagcggttctttggtctggatgacggagtattcagagaggtcacccggcatacgttttgccagcacctggcnnnnnnnnntttcattgaagcgcgcaatcatggcagcaaggttgtaacgcgacgggtcggcgctggcgtcgtcgatcacaacgtctggcagcaccacgacaaatggattgtcaccaatggcaggtcgcgcacataaaatggagtggcctaaacctaaaggttcaccctgacgcacgttcataatggtcacgcccggcggacagatagattgtacttccgccagtagttgacgcttcacgcgctgttcaaggagagattctaattcataagaggtgtcgaagtggttttcgactgcgttcttggacgcgtgagttaccaggaggatttctttgatccctgcagccacaatctcgtcaacaatgtactgaatcattggcttgtcgacgatcggtagcatctctttgggaatcgccttagtggcaggcaacatatgcatcccaagacctgctaccggtataactgcttttaaattcgtcattcttttcctacctctaagtggctgatagtgcgtaaattattgccataggttagccaaacgttatggctatataccaaagcttagttccgcataactttgattaaaccttacgataacactacacaccatcagcatctgggttactcggattactcggaaatccacatactgataatttaatcagtacctctttccgaataatcgtagtccaacctggtccttttttctctgactcgtctgcattactcagaaacaaacgttatgtcgtcttttttggcatggacgaattcatactgcagagttcgatccagaccttgcgacagcgtatacggtgccacaaaacctgaagaatgcactttcgttgcgtcaaactgtgttgttgcgcagaattttttcacgcgcacagagctgacagcgtattttttgcccgtaattttgctcaggatatcaaagcaatatccacccagcattcctagtgggtaaggcaagtgcatagaagggatctttttgttcaggctttgttcaacttcagcaaccaactggttcatgttcaggtctggcttatcaacgtagttataaacctcgtaacctgcggcaacattcttcagtttgtacttgataaactcaacaatgtttccaannnnngccatggacttatagttagtccctgcgcccaccatcataaacttgccgccagcgatctgtttcagcaagttatagacgttaccgcnnnnnnnnnnnnnnnnnnnnnnnnnnnnnnnnnnnnnnnnataacggtaggacggatgatggttaatgaacgttctgttggtgctttgttataccattcacgcagcacttcctctgcctgnnnnnnnnnnnnnnnnnnnnnnnnnnnnnnnnnnnnnnnnggatcgtgtggatggttttcgtcagggttgtgtttgttcaaaccataaacagcaacggaactggtaaagatgatatttttaacgccatttttttccatggccgccagcacattgcgggtaccctgaacgttgacatcataatagagagaagtagggctgacgtcatcgcggtgttccgctgccagtagcacaacagtgtcaaaaccggctaacgcctggtcgagtgcctgttgatcacgaacatcaccaatctgtgtgatttctggataaaagtggctctgctgtttgtccaggttcttgatattaaagtcagcaattgccgtttcaagtagtcgggttcctacgaatccggaagctcctatgagcaaaacgttatcgttcataaatcactttagtctggttgttacgtaagaaacacaagataaagatgagtaccttccctgagtagtcaatgctgcccagccccagctttaacagttagtgtgaggattataatcttttagaacattatatccagtaagtttatgaatggtcgcaaatctactctctccgttccggcaatctaaagttaatcttttccacattaacaatatggtgattaatcctgtcgatatcgacggagctttgccctctttcattcaccgcatgaacatttgcaagagacagcagtgtttcttttttcgccataaacacgccgcgaacgtctttgcgcatgtcgaagttcatgctcaatgcgggtccaactgaggattcctgcatcaccttgatatttcgcataaaaagatgttgcggtttgttgtgtagctcaagcgaggcacgcttcatctcaatgttagtcagcgccacaaaggagacagcattcccggcggagatttggataccgcgcaatttataagcaagatgggtgttatccagctgaatattattcactcggaaattttgcggtatcgagagatatttgcctttaattaccccatagccgattaacatcccggcgctattaatcatttcaatattatcaatcacgaaattgtcacaaccgtaaatagcgaccgtcgcgttatcaatacctgctttcttactgaaatccggcgtgatattgctggctttgatattacgaataacaaaatgtttaccattttcaacatggatcaactgccgacaatccgatcctgtgatattcgccacaacaaagtttttcactgcctggtcttccgggtaattgttatngtnnnnnnttcccgcaaggcctatgccgatgccccagttgattttgccgttagtacagttgatgcgctcgatgacatggtcggagatcaaaatatcactgtcgttaattgccacgttccattcaatggcgtcgccctgtaagtcgctgaacttacagttggtgatgttggcaccgattatctggttatgaaatccctggcgtaagatggcgtaattagcgtggctgacagtgaggttatcgatggtcaggttgcgcatgacccgtttgtttttgccgccgatataaatctgcgttaccgggccaaagccgctcatcgccagacctttgatggtgcagtcagagccgcgcacatccagggtgatgttatgcatactgctgccctcctcccctgtcacctggctgccgtcctgtaagacaaatcgccctctgccattgccgcgcaggcttccaaggatgtgtaacgttttaccgggagggataaagatgccggtgttgatattgtcacaagccaatccggcaggcacgacgaccgtttgcccttcgctgaaggcttgtttaaatgaggcgatccagtcgtgtggattgtagtcgttaatgttaacgctttgtcgggccggaagtgcgcgagcgaaaggggtatggaggaaggcaagcgccgagcttgccgtcaggaaggtgcgtcgggagagttttttaaatggcatgcgttctcctctataaagcctgcagcaagctggcgagttctcgattgatcacctgctggttaaaatcgtgttcgactttttcgcgcgcacgtttgacgaccggagccagttcgtcggtgtccagttggctaaacgtcgccagacgttgtgccagagcgcgagcatcgttctcaggcaccagccagccggatttatcggcctccaccaattcaggtattccgctatgcagagtagaaaccaccggaatgccgaccgccatcgcttccattagtgccaccggaataccttccatatcgccatccgcgcccgttaccgatggcaacaggaagacatccgcgtcatcgagcatctctttcacttcatggctcggtttaaagcccggcatatctaccacatcttccagttgatattgttcgatgagggtgcgcaggcgtcgttcccacgggccaatgccgaggatgcgatagcgaaatgccatgccctgctctttcaactgacggcaggcttcgatcgccacatgcaggccttttttttcggttaagcgtgcgacggagatnatttccagcggcgttgcgggcgctttcaccggacgcgggctaaaacgcgtcatgtccacgcccatgcgcgatacggcgattttttccctcgggcagcccattttttgcagccttccggcccacagatcgcttattggtagcatcagatcgccgcggcggaacagttgctgatattcgggagtgtaatggttgagcacctcccgactggagatatcaataccgtggaagatagtggcaattttgccgcgaatgacacccagttcgcggagttttgctgcggttacccctgcgggaccaaagtgagcgataaagacatcggcatgaagcggtgctacgacctggccgcaaatggcagacaaaatcaggttccgcgactcggcaccatagcgtttgaggttgagcgcctgccaggtatttttacgatgtatgccgcgtaacgtctggctggcgcggtggcgcagtttcgccactttgcccgtaggttcgtcctgtaaccagcgggttctggcggcaaggttgtatttcgtccatgccgcgtgggtgttctctgtatcgcctttttgcaacgcgacgatctccacctcaaatcccatatcaataaacgcggtaatttgattgaggacgaaggtttccgacgacagcggaaatttcagtaaaaagaagccgaccttcatttcgcctccccgatgcgctcaagcacagattgcaccatctgcattcccgtctgacgttcacgactgacggcttcgttaagtcgcgcgttcagcgccggaagttggcctaaggtatccgcaaccatcgcttgcaagctgccgtccagtaaatgacggatatcaatcgccatctctggcagccccagttgttgcataatcccggcggatttatgttcgtagttgatggcaattgccggagtggcaaaattcatcgagataatggcggagtgcaggcgcgtaccgacggtgagttcacaggccccgagaattttgcccatttccagatcgttgagttcatccatcactacgtggtaacgggcaggatcgctgatgtgctggcgcagattgagcgctaccatgcggtcgtctttgttatagctgtcgatgcccgtacaggtggagagcgcaatgacctgatagcctccgtcgagaatgcgattgaccaccccggcaaaggctttttcatacgcttgttgagtggtgccgaggcgtttgtcgaacggtgccagttcgcgcagggtaattgccaccgttttctgttgtgcggcaacgtccagccagtgttggacggcatagctggcggtgaaatcttctgtgtggtgatcgaccagccacgcggtatcgacgccatgttcaacttttgcagtggtgatattgctgcgtttcatcgaatcaaggctgaccgattcgcgcaggatcaacgcatcgcagtgaccaaaaacgtagttcgccagttggttaaattgctcatcctggaagggaccgacgctgtgaccaatcataaacagcggctttttcgccataaacgtgcaaagtgcntgttcaaactgcnnnncaccatagagatcgacaaaaaacgatccgccgacctgaataatggcgtcgtaacctgacagcaagcgcacgaagtcggtgaatccctgggcgatggcgatattacgcagcttgccagtgtcggtgacgcgtgagagcaatacctgatgctggtagcggcgacggaggacttttttaacgnnnncgacaacgcccgccgcgctgttgtgttgtttcatttgcaggaacagcggatcgcccattaccgggcggttgagcagccaggaagaactgaccggatagcggctcatcacgtccacttcggcatgtggattgggatgttgatggcatcaagtaagccgcgcaagatggcgctgtcgccacgattgccgcaagtgtggttgcccagaataagtaatttcattttttcctcataaatttgatgccaggtgaggttagttgttgttttcgttgccggaaccgaaaacagccattcaccccgcccgtaaaaacattttcattttttcgctgcgacaaaactgacgcttcacttccaccaccagcggatggcgcgacagcacaatcatcactacaaacgccagcacgcccgcggctatttgcaccgccagcagcatccccagcgccagttgccctttcagcaataggcccagcgcataactgaccaccagcgtcggcagcgagagataaaacggtagccataaactcaggatgtactggcgataactggaaccgagcaccggtttaatcatcacgaagtaactcagaatggtgttgataacctgcaccagcaggaaaccgagcgtgacgccgattgcgcccgccatctgcccacctataacaatcgccggaataaacagaaaggttttgaatacgttgaatttaaagctgatatcgacccgtgctttcgccatcagcagcgaaccaatcgggttacccactgagcgcagtagccccacaatacacagcaattgcagcaccggaataatgctgttccacttctcaccaaagaccagcggtacaaagttatttgacaccaccatcagcccgagcagcgccggaaagttgataatccccaccaccgacagcagcttgtagaagttgacgcgcagcttttcggtgtcgtcctgaattttggcaaacgccggaaacaacacgcgggtgatgatggggttcagtttcatcggcggcacaacggccacgttgtacgccaggttgtacccccctgccacattcgcgccgagaatacgcgccagcaccagcgttgaaaggttggtgttgagatagttgatgatgctgtccgccgtcagccaggcaccaaagcgtaagttcgnnnnnnnagacgccagcgagaaatgcagaccagggcgataaattntgcggccaaagtagccaaacagcagcgttcttaccgcactattgaccagataaccgaggatcgcggtcatcgccagcggccagaaatgggcgctaaccaccgtaaaagtgaagcccgccagcaccgcgctggtttcgatcatgccgattttgttgaactccagctccttctgcatcaacgcgcggaactgttgcccgtgggggancaccacaaacgccagcgacaatgttttaatcaagggtgccaggtccgggttattcagcatgtcaccaatgagatcactcaacaaaaacaccgccacgcacaccacaagccccagcccaacgttcagccagtacagcgtggtgagttcaaggtggctgatttcttttcgctgaataatggagttagcgataccgaagtcagaaagcgtatctgccagcgcgatgatcaccagcgacacagtcagcaggccgaactggtggttgtcgataatccgcgccagcacggtcatctgcaccaacccgaggccgatgatgatcaccgtggcaatcgccgaccacttcgcgccgctgatggttttttcacgtaagctcatatcaatatgccgctttgttaacgaagcccttgaacaccgtcaggaaaacgattttgatatcgaaccagacgctccattcgcggatgtactcaaggtcgaactcgacgcgtttttccattttctccagcgtgtcggtttcgccgcgccagccgttaatctgcgcccagccggtaatgcccggtttcaccttatggcgcagcatgtagccttcaatgagctggcgatactgttcgttatgcgccaccgcatgcggacgcggaccgacaatcgacatccccccggtcagcacattaataaactgcggcaattcatccagcgaggtgcggcgtagaaaattccccactttggtgacgcgcggatcgttctgcgtcgcctgagtaaccactttgtcgttctccatcactttcatggaacggaacttccacactttgatcggtttgccgtccatgccgtagcgagtctggcggaaaataaccggcccaggtgaactgagtttcaccgccagcgcaatgcaacacagcaccggggagatcagcagcaggataagcgtcgccagcacaatgtcttccgcacgtttgagcaggcggttaaccccggaaagcggcgtgtcgtacagcggcaccaccggtacgccgttcatctcttcgatacgtgaatgaagaatattgaaggtaaagacgtcggggagcagcagcaccgaacaggtggtgtccgccagttgatggaccagttttttcactcgcgcgccgtcgcacatctgcatcgcgatatagacgttatgaatcttgcccgctttcgcatcctcgaccagctgttgcagattgcccgcccagtcgttagaaacgccgcccggtttcggatcgtgatagacacccaccacttcaaaccctaaccacggctgattacggaagctctccatcagcatttgtccggcggctaaatcccccgctacggcgaccatacgcttgttatagccatgattacgcagccagcccgccccaatgcgaatacatgaacggcaaaccaccagtccgatgctggtcagcccataccacgccagcaagattttcagttgcgtatcgaaatcattgttgaacgccaccagtccggcgctgaaaatcacgcttaaggtccagttttgtagcagcagggcaaattctgtcgctgcccgaacaccgcgccatgagcgataaaaatcggtgatgccgcccagcatctggaacaccaccagcgtaatcagcgccaccaacaggtgcatgtagaggaatgacaatccgctcacttcgcaaaccagccatagcccggcaaacatgatggtgatatctgaaaagcgttgcaccatagagattaacgatgcattggttttcgctcgctcgcgcttttttagatttgtcatcgttgttcctgttctattgtcgcctcgccccgcaccccggccctctccccaaaggggcgagggggagaagaaagttccgtgctcacttctctccgcaggcagtagagcgtcagggtgagggggaaagtaatgacattactcgttcagcaacgtcagcagagttcgcgttcgcgcttccatcagcggcacatcaccgcgcgattccacannnnnnnnnnnnnnnngttcggtgttggaggagngcaggttaaagcgccagtcggcaaaggtcatgctgatgccatcggtgcgatccaccgccagcgcctcacggctaaagtnnnnttcnacgcggttaatctcctcaacggggtgcgccagtttgctgttgatctcaccgcttgccggaaacgctgccatccgatcgcgtaccagttcgcccagcgttnnnnnnttcaggcacaccagttcggcgaccagcagccacgggatcatgccgctgtcgcagtaagcaaaatcacggaaatnntggtgggcgctcatttcgccaccgtagatggcgtcttccttgcgcatacgttctttaataaaggcgtgtccggttttcgacattaccggcgtgccacctgcggcagtcaccacatcaacggtgttccaggagagacgcggatcgtggatgatcttcgcgccgggatttnnttcgaggaacgcttctgccagcaggccgacaatgtagtagccctcaataaactgccctttttcgtcaaacaggaaacagcggtcaaaatcgccatcaaaggcaatgcccatatccgcgccgtgtttgatgaccgcattgcgggtatcgtcgcggcattccggcagcaatggattaggaataccgttggggaaattgccgtccggcgtgttgtgtactttgatcaattccacgggtgcgccgagggctttaaagcgggcttcaatggcgtccaccaccggacccgctgcgccgttcccggagttgatcaccagcttgagcggcgtgaggtttttgacgttgatataaccgaacaggtgatcaacgtaagcgtcacgcagattgatttgctgatagcgaccgcgtttggtttcatcaacgggaggaaagtcgttggcttctgccagacgctggacatcgcgcagtccggtatcgccgctgatcgggcgagccccctcgcgcaccagcttcatgccgttataatccatcggattatggctggcggtaacttcaatgccgccatccacgccgagatggaacgtggcgaaatagatctcttcggtgccggacataccaatatccagcacatcgacgcccgcatcctgtaaacctttcgccagcgccagttttaagatttcgctggtgaggcggacatcaccgcctaaaacaatggttttcggtttgagaaattcgccataggcgcgaccaatacgccaggcgatatcttcattcagttcttcgcctagttttccgcgaatatcataggctttaaagcaggttaattttttcatatcgttaccctttttcaggcaatagttggccctgaccgaaacggccaattttgtttttgtcgttatttaccgaagaattaatccggttgattatgcaactgctacacccgtccgtagcgatccgcgaagcgcaccacatcatcctcttcgagataagagccggagcgcacttcaattaaatcgagcggaattttccccgggttttccaggcaatgcgtcgcccccagcggaatataaatggactcgttttcaccaagcagtttgatatcaccgtcgatagtgacttttgccgttcctgcgacaaccacccagtgttccgcgcggtgatgatgcatctgtaccgacaagccttcgcccggtttcacggtgatgcgtttcacctggtagcggtcgcccgcgtcgatagagtcatatttgccccacggacgatacacttcgcgatgcacccgatgctcatggcgaccatcggctttgatctgctcgaccacttttttcacatcctgcaccgcgttacggtcggcaatcagcactgcatctttggtctgcactaccaccaaatctttcaccccgacggtggtgaccaggccagattcggcatacacatagctgttttcagttttgtgattaatcacatcgccgtagcaaacattgccctcggcggtgtgggcgctgatctcccataatgaagaccaagaaccgacatcgctccagcccgcatccatcggcaccacaacggcatctgccgttcgttccatgaccgcgtaatccaccgactcttccgggcaggcgagaaacgcttcttcatccacacgaataaaatcgagatccgaatcgacggcgctcatcgctttttcacaggcatcgaggatatccgggcgatattttttcagttcttcgagatagcgtccggcncggaacaggaacatgccgctgttccagtaatattcgccgcttgccacataggcctgcgcggtttccagattcggtttttcgacaaactgcgccacttcaaaggccaccgtatcctgctcacccgcagacacttcaccgcgacgaatatagccatatccggtttcagggagatccggcacaatgccaaaggtcaccagcttgcccgcttcggcatacggcatggcattacgcacggcggcacggaacgcgtcttcatcggcaatcacatgatccgccgcnnnnnncagcattaacgggtcgctctccgggctatgacgttttgccgccagcgccgccagcgcaatggccggtgcagtgttacgccctgccggttcgagaataatgttctcggtgagtttgttcagttgacgcagctgttnnnnnacaataaagcggtgctgctcattgcaaatcaccaccgggctttcgcactccacgccgttcaggcggcagatggtggtttgcagcatggtgagatcgcctttcaggcataaaaactgcttggggtaaagtacgcgggaaagcggccataagcggctcccggagccacctgccatcacaactggatagagtttcgactgcgccataattatccccgaatatcatttataaattgacgtaacacgttctctttatcgagcgtgcgttcggcatattcacgtgccaccgtgttgtgtttgggcagcaggagcgcctgacgaatccccgccaccagcgcctcgaccgattccggttctacgcaaaccgcaatgcccggaaaggtttcgcaaagctgccccagttcggtgtgggcttcngcngtaatcaccgcgttaccgcctaccgccagaatattggtcagtttcgacggcaatacggcatctgccgcgccgcgtttttgcaccaccagatggcaatcgcccatcttcagcagtgcgggtaaagcgtcatacgattgcagcnnnnnaaattgcatgttgtgcagtccacgctgctgcgccattttttcaagccgcgctttgccgccgccctgcccgacaatggcaaaaatcagcggttcatcacgcaggcgatcggcagcttcaanaacgttttccagcccctgcttttcaccaatattgccggagtaaagaatgatttttttgttatccggcaggccaagctggttacgaagggcatcaacatcgacatctgcgacatgctgaaaacgggcaatttctgaccagttggggaagaagatgacgttttctgccgccacgcctttttcgatggctttattcatcatcgaacgcgaaatcgtggagacgttatcgacgttatgcagtccgctacgttcgaacgccgttgccagctgtgccactttgccgcctttgccttttccggcaaggcccagccccagcatggcgtccacttcgtaatcctgaatatgcagcacggtacgcgcgccagagagtttcgccagcaggcgcattcccggcgtgcaaaacagcgttggcactacgccgataatgcgatccggcttccagcgacgttgcgccatcaacgggaaaaaactgctgacggcaaaactgccgagatgcaacaggcgtttcagggtgctcggctgttttggcacgtacagcgggcagcgccacaccgtagcggccccctcttctcgtttgtaccgccaggcggaatagttctcgcccacctgccactgcgggtagtaaggcggtgcggtaataacccgcacctcatgaccttgcgccgccagccattcaaccatctctccggtgtatttgccgatgccggttaactccggcgagtagttaatgccgtagaccagtattttcataatccgggtactccggcacgcttctcagcgagaaaataggcgcggctgttagcgtgaacatcgttactggcgagcagcgcgtccggcgtcagccagcggtaatcgtcatgctgctcatccggcagtaacagatcttcttcagcgactctgaagcgaaaaccgagcaccacatagtgagtggtgaaatccgtgccggagaagttatcgtcataaaagtgctgccagacaccgtaaaactggcctgctgttatcggtagacgcagccccagttccgccatcgtcagccgctcaaatgcggcttccagcatttcgtctttctgcacgcgccctcccggcacaaaccagtaaccctgcgccgggcggttggttcttttgccaagcagaaactcgccgcgactgttctcgacaataaaatcgagagagacaagcggagtggagcgcactaccgtggcaaagtcttcctgacgtaaaaacatcattacccccgaaagcggtcttgattctcaaggaaccactggtaagtgctggcaagccccgcttccagtgagatttcgtgataccagccaagctgatgcaggcgcgtcacatccagcagtttgcgcggcgtaccatccggnttgctagcatcaaaaaccacccgacctttgtaacccaccactttggcgatggtttgcgccagctcgcggatagtgcagtcaacgcccgtgccgacgttaatgtgtgacagcatcggctgggtgttttccagccagacttcgtgcgccagctccatcacatgaatgctcgccgccgccatatcatcgacgtgcagaaattcacgcatcggtgtaccgctgccccacaccaccacgtccggcnnnntctgtgccgtcgcctcgtggaagcgacgcagcaatgctgggatcacatgcgagttactcggatggaagttgnnnnnnnnnccgtacaggttggtcggcatgaccgagcggtaatcgcgtccatactggcggttgtaagattcgcacagtttgatcccggcgattttggcaatggcgtaaggctcgttggtcggctccagcgtaccctgcaataactcgctttctgccatcggctgttttgccagtttcgggtagatacaggacgatccgagaaacagcagtttgttcacgtcgttctgatgcgcggcgtgaatgatgttgctctcaatcatcatgttctggtagatgaaatccgccggatacgtgttgttggcaacaatgccgcccactttcgcngccgccagatagacctggtcaannnnttcgctggcaaagaaatcatgcacagcgcggctgtccagcaggttcagctcgtcgcgggtgcgtaataccagttccacatcaccgcgctgttcgagctgccgcctgatggcggaaccgaccatcccgcgatggccagcaataaaaatgcgttgtttactcatgcttatgactccagcgcgatcgccacgtcgtagccgtgagatttcagcagagagtgttttttcgccgcttcgaggtcattagccaccatttcagacaccatctctctgagggtgatttccggtttccagcccagtttttcgtgcgctttggtcgggtcgccgagcagcgtttcaacttctgccggacggaagtaacgcgggtcaacggcgataatcacatcgcccggtttaacgcccggcgcgtcatgcccggtgacggaaccacaatacccttctcttcaacacccgtgccttcaaagcgcagtttgatgcccagctgtgctgccgccatttctacgaactgacgcacggagtactgaacgccggtagcaataacgaaatcttccggttgttcctgttgcagcatcatccactgcatttttacgtagtctttggcatggccccagtcacgcagggaatccatattgccgaggtacaggcacgactccagcccctgggcgatgttggcgattgcgcgggtgattttgcgggtaacgaaggtttcgccgcgnngcggggattcatggttgaagagaataccgttacaggcatacatgccgtaggattcgcggtagttaacggtgatccagtaggcatacagtttggcgaccgcatacggagagcgtggatagaacggcgtggtttctttctgcggaatttcctgcaccagaccatacagttcagaggtggaagcctgatagaaacgggttttcttttccagaccgaggaagcggatcgcctccagcaggcgcagcgtacccatcgcatcgacgtctgcggtatattccggtgactcaaaagaaaccgcaacgtggctcattgcgcccaggttgtacacttcatccggctgcacttcacgcaaaatgcgcgtcaggttggaggtatcactcaggtcgccataatgcagatggaatttcgggttgcaggtgtgcggatcctgataaatgtgatccacgcgctcggtgttgaatgacgatgcacgacgcttaataccatgcacctcgtaacctttttccagcagaaactctgccaggtaagaaccgtcttgtccggttacaccggtgatgagagcgacttttgacatgtcttattcctctgtattttttttgaatttattcagtttcaacgcgttcgcgtatcagcactgcgggattcccccggcaaaccacatttgccggaagcgatttaaaaacactgcttcgcgcacccacgacggtgccgtcgccaatcgtgacgcctggggcaacaaagacatcggttgccagccagcatttctcgccaatcacaataggcgtggcgttaatggtgaaatgttgacttgcatggtcgtggctaccggtgcataaataacttttttgcgatatcaccgaatgtgcgccaatggttatttcaccgagggtatataaattgacctcatcgccgacccacgcgtaatcacctaaggttaatttccacggataggtaatttttactgacggacgaataactacgttttttcctatttttgcgccgaataaacgtaataaaaaagcccgccagcgatacaatacttgtggcgaccaggcaaataatgttgcctgtactgcccaccacaattgcactttaatagcgttgccgccccggaaccctttcggcaccgagaaaccacttaaatcctgcatcgttttcccttatattcagcttttgttatataaggctttcgtctttgaggtagtacgttggcgtaaatgccaggataattctgcccagaagccaggcacatgtaatatctgccgttggacttttttggcgtcagcacataattccatattattggtggtagataccccacccatggaaaattcagacaccaggccattgagttttttaaaagcataaccggctttatacattttggccgccagcgcgtagtcggaagaaactttatattccaggtcataacgccattttttcaagccggataccgggaaaaatatcgcctgatgactggcgggcaggctgtgataaatataccaacccggtttggcgctacgtttaattttatgcccgtcgccaaaatccagcagcgcatcgccggtgatcatcacgttatctttttgcatttttaacttacggacaaaatttgcggcatcctgatgaaaaatatcgcccgagttgagaaacaacgcgaacttgccttgtgccatcgcaatgcccttgttcatggcgtcgtagataccgttatctggctcgctgacaaagcgtaggttatagatacccttgagattttccaggtactcacgggtacnntcgttggaaccgccatcgacaacaatccattcgaagctgatatcgtccgcctgcgccagatgcgccagcgaggcgtgtgttttgactatccctgcgaggttacgaaacgcgacagtgattatgctaagcaacatgttcttattcttacctcgtaatatttaacgcttttcgcaaaataaacggacagacgattaaaaatgcatattccgggctaaatatcgaaccggtaaaaaacagcgataccggagtaaaaagatataattgcacgcgaaaattgcggttatcaccaaaagcgttgatcatcatttttatcactttccccatgtaccacagcgataaaaacactgcgaaccaggaaaaataaataatcagcagatacaaaccattgtctatggtttttccgacatccgcaccgttaaatattccgaatgatgcgacatattcataaagtgagccaaatctgactacaccgtcaatatgggtcaaagaataaccgaccatcaccagcggaccgacaatacgataatatgatgacgatccttccgtacctaaatcgcccagacgggtggaaatataaggaaatgcaattaccacaccaaccaggaatacagccagagaaatcaatgctaacggtaactttttcttaatcgcctctttattcagatattgaaatgcccactccagcaaataaaacaggataaaggtcataacccctgaaaacgatccggataatattatccctgcgagaatcatagcatcggttttaggcgttttgataccaaactgtttgatgctgagccaaattgagattaatgccagagcaaaaaatgccggttcgaaataaagtgctgtcgtgcgcttgccgccgaatttaatgaaattcagcacatagctgttgctgtaaatcagatatttcgaaatcgactccataatactgctgccgccggtgaggataatttgcgccatctccaccgccgccagcgccaccaccagcccgaccaccagataaaagaaacgtaatatcttgcgatggttgtgtggcgaaatcgttttaaagcgaatactccacaccatgccaataatgatcacaatatagacaaacagcatggttgaagtgacgtatttactggcatccaacgactgaccaaacaggtagttaaacgccgtgagtcccgcgccaatccctaaggcaatcatcaattttttaacgctgatgcgttctaaaaacagcagtaacaagacaggtaaaaaagtgacgatggtgatggggaaactttcgccaagctgggcgattttgacgttaaccaacaggtaaatcagcggcagcagcaggtagctacagattctgatagaagttgacatactcctccagcatctgttgtccactgtaggcggcacggctgcgttggctgaactcagccagcgtggtaccaaatatcgcctgcgcgatttccggtttgcttaactgcaccagttgcagcacgtcttcttcgctgacggttttaccgccggatttttgcagcacttcccgcgccgcgtcgctatgggtggcaatcaccggcacgccaatcgatagcgcctcacacaaaatcagcgggtagttatcgacgcgagaactgaataccagcgcatccatctgattgagcgcgctcatcaacttgcgcttgtcagtttcaaagccgtgattaaccacgttgccagcggtgaacggcgagaacttaccaaaggtatgcagttcaattttgtcgcccagcgccatcatctcacgcaccagttgctggttagtcttgccgtcgtaacgcaggtcatgcgccaccaccgcgattttcggcttgccctgagtttcncgcaccggaggcaagtccgccagaatcgcttcggttgccatatcaatgccattattgataatccggcaacgccctagaccgtacagactattgaaagcatcagccacatgctggctgggggaaataaactgacagcccagcgccagcatctcacggaataactggcgtttgcccgccaccagctggtnnncgcgatcaatcttcaccggcggataattatttaaggtcgggcatttctggcagccctttttccagccttcgcaaccgtcggtaaaggcgcagcgtccggtaacgctccagtgatcgtgtaacgtccagaccaaagtgatatccggtttgtggtttttcactttttcgcaaaagcgcaccacgctcttaagannnnnncagtagctgtgcagcacatgaaaatgcaggaccaccggncccggtgtgcgagtaatggtgcgatataactcattgaaattgccaaacagatcgcgattaaacagacgaaacagggcaatattcgccattgcggtcatccgcggcgtatgtttgatgacctgcggatagttctgatggctgacgctctctttgccgcctttgccgtagccgtagacaaaatgtgacgccagcccctgttgcagcgcacgctggtggagatctaacgccacacctgctgccccgccttccgccagtcgcacattaaattgcagaatattcatttaattaccttcactcgcgctttttctcccaccaccagcgcgttgtccgggacagagtcgagcaccacgctgcccgcgcccacggtgacgttgttaccaagcgtgatatcaccaagaataatgacgttggcaccgagttcgacgctgttgccaatgtgtggacatgccatgttatcggcaccacgattgccgatagttacgccgtggcgaatggtaaaatcatcccccgctaccacgtttttattgataactacggcgtaaccgtgatggatagtaaagcggcggccaatggtcgcggcagcctggatttcataaccgaaaaagcattcggtgataatgcgatacagcaccagcagcggggccgcccacagattgttgaggacgttctttttgcgccacaccgaacaaaaatgagcaacacgataggcaagtaccatgcagcacgggcgtaaactccagctgttggcgcgcagatcttccagcatctttagcgcccccgaataccatcagccagacgtttgccgttacgcaccgacagcagcgtcagcaaagtgcgccaggtcatgcgtttattgcggatctggtagagggtaaacagctgatatttttnnnnngcnnggtcaaatttgtctttgtgcttgcggtaaaagtggaagtatccggagaattttttcggtgacgaggtgatctgcatttcaccgtgattgatatgcaggatctgcgtcgcctcttccactttccacggttcgccgtactccaccaccatccgcaggaagatgtcgtaatcctgtgccgctttcagttcggtatcgaacaaacactctttgaaacgccatgcccaggtaaagacctgattgccaatgatattgcgtttatagaacaggcggcgtgagtacggcgatttgggatacagtggtaagcttgccggttgggaataaacttctccctggcaaacgtagtcgttagcgtacaaaaaggcgtgagtgaccagttgctgtttatgggcgaggaagacgctcagacggttgggtgtccattcatcatcatcatcgatcccggtaatgtattccccttgcgccagcataatagcctggttacgtaccgcgcacgccccgctgttaatgtcgttgtgaatgtaagtgatacgcggatcgttgagggcggtgacgtactgttgcagttgttcccaggaggtggagcaatcatccacgatgatcatctcccagttgctgtagtcctggcgcaagaccgattttatcgcccgaatcgccagttgttggcggttccaggtcggcatatagattgagatcagcggattgtctttcataggttgttctcccggcttatgagctggtttgcttgccggatgcggcgtgagcgccttatccggcctacggggcggtgcgaatgcaggcgtcgttatttcgcatccgacttatattcgtattcgtaatagccataatcctgatacgcgctggcgcggcggaagatggagttcagaatcacccctttcaccggaataccattttgctcaaagcggctcagactggtttccacttctttcaatgtgttgaccgcataacgcgccaccattaacgtggttccgacatgacgaccaacaattgccgcatcggtcactgccagaatcggcggcgtatcaatcaacaccaggtcatagtttttactcgcccagctcaccagttcggcaaagcgttcgctcattaacagttcagaaggatttggcggcacctgaccgcgcgggatcaggtcaaatttggcaatagaggtcggtttagcagcggtagtaatatcgccctgaccaatcagaatttccgacaggccattaacgttattagtgcccaacagctcatgggtgtagcctttgcgcatatcgcagtcgatcaacaacacgcgtttattggtctggctgatcaccgccgccaggttggcgcagacaaaggttttaccgattgacgggctaaccccggtcatcatcaacacattgttctgcgcctgcatcatcgcgaagtgcaaactggtacgaaggctgcggatggcttcaatcgccagatcggttggattccccaccgccagtagctggctctgtttatagcgtttaatccctttgatggttttgacgctatcgcgcgctttctgccactccgacagcgggatgctggcatagacgctgataccgtgttcttccagcacttgcgggctttcgataccgcgattaaacaacgagcgcagcagcacacccacgatagagagcatcagaccaaggataatcgccccaaggataatcagccctttcttcggttttagcacaccaggctgagtgattgccgggtcaacaatgcgcacatcgccgacggtgctggcttcggtgattttcagctcctgctctttattcagcagttgcatatagacctgctgaccagactcgacatcgcgggtcagacggacaatctcctgctgtgttttcggcatcgccgttacgcgaccgttaagtttggctttttcgtcttccagcgcctgacgtttctccagcagcgtgcggtacgncgggtgaactttggtgtacagcttggagatttccgcctctttaaaggtcagttcgttcaactgggcgtcgatgttcaccatcgaatcgagcaccgctttcgcttccagcggcagatcaacagaatctttatcctgacggaaggcattcagtttgttttcggcaacatcaaggcggctacgtacttccggtaactgttgcgcgaggaaagcgagacttttcgacgcttccgccgatttgcgctcaatattttgttcctgatagttacgggcgatgctgttaagaatgtcgcggatctgttcgcgatcttcaccggtataagtcaggctcagtacgcctgcgtctttgccgttctccgttaccgtcaggctgttttgcagttgattgatcatccccagcgtggagtatttggtgacggtaaactcactgcccgggcgggcgtgaatggcttcaaccatcagcgtgacgccttcttttttcagcatctggcccgcttgcccacgggcgctaaagccgccatcactgctcagggtgtagtttttatcgtccagcacattaagcgtaaacacctgatccgccatctctttcgggcggttaaaggtggtcactttcaccgtttcgttctgacgtcccatcaggcgatcccagcccgcaccgaaaatcgggaacgtgtttttgctcaccgcaatatcgaggtcgagatcgtccaccgttttaccaagcaccaggcgcgaacgaatcaactggatctcggcgtccgatgcaggcggtttgttggctaacgccgatccgatatcctgcactaacgaattgccgctgctttgctcgatttgtaccagtgcgtcggcactataaatcggcgtggcgaagaaggtgtaaaccacggcacagagggcaaatacagcggtgatgccaatcacccaccagcgcgcttcaatgacggtgccgaccaagcgaccaatatcgatttcatcactgcccgttaccggagcggcatgntgtttactttttctgtcattcttatacctgctctgcgttcaatgcctgcgcccactggcgggcagaccgttcaagtaatgtgtacaccgctgcaaacgtttcccggcttttgcgatacggatcggggatttcacattcgttatcccagtgaccaaacagcatcactttgccgcgcatctccggtgccatctcgcataagcgttcgatatggcgcttttccatggtcaaaatcaggtcatagttgcgacacaggcggcggctgatttgtcgtgcacagtggccttccagagacagttgatgttctgcggcgacgctgatagcggtaggatcagcgcccttaccgaccagcgcgccgagtccagcggactccactttcagttccgggtgataacgttgcagtaagcgttccgccgtcggggaacggcaaatattgccgacacagacaactaagatgttgttaaacatgacgattaccagttatgaatgtcgctggctgtatccgtcatgtaacggacaccgctaatagttggcagcaactgattgatcagacggttccagcgggaaaccggggcggtggtgacatacaccacgtcataaggttgcaggcggaattctgtcgccatcaccagcgacgtcgcatcggacatatccagctggtagatattggcaancntgccgttacgcccgccctcgcctttcaacggacgaatgacaaagataccgctggcgttggaggtggtcatgtcgataccttcggcattgcccagagcttcagtcagggtcatgccgctaaagtccattttcagggtgctctgtttcttcacttcacccatcacaaacactttcagatcatcattacgcggcacgtagagaatatcgccggggtaaagcaggcgattctggttgaggtcgccgttttgcatcaacgcctgcaaagaaatgcgctcttcacgaccattgtgtgttagcaccacgttgcgccagtcagcggtgtcggtcaggccacctgcggcgttgatggcatcgagaatggtcagtggtacgttggtaatcgcctgttgaccggatttattcacctggccggagatataggctttttgcgagcggaaggcggcgatattaacgtccacctgcgggtcagcgatgtacgtcgctaagcgcccggtaatatcactgcggatttcagcgagcgttttccccacgacgtgaaccttgccgatatacgggtagaacatggtgccgtcaggctgtacccagttgccggtgtcgctggagctgcggtactgaccggctggcgtggtgagttccgggtgatcccagacggtgacattcagaacgtcgcccggcccgacgcgatactggtaattcgcgatctcgctttccagcgtcatattggggcgcgctacattcgggcgtgggcgtaattggtcaatcaggcgcggggtcagcggataaacattcaccattttgtcgagatcgaaatcagcgtcctgctgtttgatgacgtctttgcccatcgtcgacatattgctgcccggaagtactgtgcaaccgcttatcaaggttactgacaccaataatggcatcaatttcattttggatttcatcattgtttatttatcactttggcagagtaattatcctgtgcactattaatagcaatgtcgccatgcacatttaccttgcagttaattgaataaaaatttaactggcatcagtcctaaaaaaattgatttcatccgcaggctattgacagaataattcagactggtctttcaggcatccagacacgctaccgcccctggctttttagctaccaatacactgatttagcttaatttttaaaaccctctnnnnntacagtcgttgatgagaaagggttattgcggaaattaacttccgaatataaggtgacattatggtaattgaatattggctctccaataatgcaggaggaagtgttacagctaacggaatagcaggcaaggtaacaattcggcaattggctatttttaagaattatattaagtgtcattcaatatggtttttaggagtttctttaggttgacaatatttaatattgcgtctccacatgcgatatttcttaaacaatgttttattattaccacttttaattcagggataatgtgagngttattaccctcaaataatatgagataaatagtgctgcaacattgcatttttgccccgatttatccatgatcgaattgtgacatttgtcatacaacgaataggttttgtacttactatggaatggattgccgatccgtctatctgggccgggttaatcacgctgattgtgatcgaactggtcctcggcattgataacctggtctttattgccatcctcgccgaaaaactaccgccgaagcagcgcgaccgcgcacgggttaccgggctgttgctggcgatgttaatgcgcctgttactgctggcgtcaatctcctggctggtcaccctgactcaaccgctgttcagcttccgctcgtttacctttagcgcccgcgacttaatcatgctgtttggtggtttcttcctgttgttcaaagccacgatggagctgaacgaacggctggaagggaaagacagcaataatcccacacaacgcaaaggtgcgaagttctggggggtggtgacacaaattgtggtactggacgccatcttctcactcgactcagtgattaccgccgtcgggatggtcgaccatttactggtcatgatggccgccgtggttatcgctatcagcctgatgttgatggccagcaagccgttaacgcaatttgttaacagtcacccgaccatcgttattctctgcttaagcttcctgttgatgattggctttagcctggtggcagaaggtttcggcttcgtcattccgaaaggctacctgtacgctgccattggtttctcggtgatgatcgaggcactcaatcagttggctatctttaaccggcgacgttttctttccgctaaccagacgctacgccagcggactaccgaagcggtaatgcgcctgcttagcgggcaaaaagaagatgcggaactggacgccgaaaccgcgtccatgctggtggatcatggtaaccagcagatctttaatccgcaggaacggcggatgattgagcgggtacttaatcttaaccagcgtaccgtcagcagcattatgacgtcgcgccacgatattgagcatatcgatctcaacgcgccggaagatgaaatccgccagttgctggagcgaaatcagcatacgcggctggtggttaccgacggtgatgacgcagaagatttgctcggtgttgttcacgttatcgacctgctacaacagtcnctgcgcggcgaaccgctcaacctgcgggtgttgattcgccagccgctggtgttcccggaaaccttgccgttgttacctgccctggagcagttccgtaatgcccgcacgcactttgcttttgtggtggatgagtttggctcggtggaagggattgtgacattaagtgacgtcactgaaaccattgccggtaacttaccgaacgaagtggaagagatcgacgcccgccatgatattcagaagaatgcggacggttcctggacggcgaatggtcatatgccgctggaagatctggtgcaatatgtgccgctgccgctggatgaaaancgtgaatatcacaccattgccgggctgttgatggagtatttgcagcgtattccaaaacctggcgaagaagttcaggtgggggattatttgcttaaaacgttgcaggtggaaagccatcgcgtgcagaaggtgcagattataccgctgcgtaaggatggcgagatggagtacgaggtgtgataaaacatcaaatgcgcaggttcaaactgcgcatttgatttatacaaaatttagtataatctaaggatggagtaatgagaaaaaagctggcttttcttgataccagtcttgacgatttacgcgcatttccagaatcgtctcgacaggaaattggctatcaactcgacaggatccaacaagggttaaacccatacgactggaaacctttttcaactatcggccctggtgtgcgagagattcgtactcgcgatgctgatgggatctatcgcgtcatgtatgtcgcaaaatttgaagaagcggtttacgtattgcattgttttcaaaagaaaacacagactaccagtcaatcggatattgatttagccaaacgacgctataaagaacttgttcaggagcggaaaaatgaaaattgaaacctttgatagtgtgtgggatgcggtgagtgacacccctgaacaagcggaaaatatgcggatccgtgccgagcttgtaacgatcattaataactggattgaacaacaagggtttagccaggctcaggcagcttctgctttaggggtcactcaacctcgcatatctgaacttgccagaggtaagatccagatctttagtatcgataaattgatcaccatgatggctcatgcaggattgcatattcaacgtattgaaattcaatatccacatgctgcttagtgctataaatacagatggcgacaaattgacgccgccatnnnnnnaacttgtcttacatcttctccagcaacttcttcacatctttgccattgcgggaatctttattccgctcggcccagtcattcaggcgacgtttcgcttcgtcctgtagatgtttgcgcagtaactgatccacttgcagactgtaattgagttgctgccagttgccataaacccgcagcggtactggcgtttctttgaggaattcaatcagtttgctttcaccgttccagcnnnnnnnnncacgaatatcaaactgggtgtcgcaggtttgctccgccagattcaacgnnnnnnnnnnnnnnnncgccagnnnnngcgattgaccttgcatgtcgtttaacgtcacgacgccatccttcaacgtcaaatcggtggtaaagcggtcaagacgcgttacgttatcgaagttttcagcggccttcacatcaccaccattacgttctaccgcttgctgaatcatctgctggaagttcatcccttccatgcgcgtgtcggtcatttcgacatgtgcctgtccttgccagttgtggcggaatgcgtcggcatctatgtcagcaccggagaaatcaccagccagtgacatttttccggtcaacgaaatcggatagttaaacgccttcagaatggtaccaatctcaacgttttccagccgtggctggaagtttatccgcggatttattgatgtcgcgtccagcgtgcccggcagtgaaacctgtccaccgttaagcttgccctgcagttgagtaatttccagcaaacccgacttgttggtcatttgcgtggcaacatctgtaaaattcattccgcgccagcgcacgttactggcctgcaacaaaatatcagccgtaaagccttgcagtccctgataggccggttcatcaatacgtgaagaaatgaccgggcgcggcaacgttgattggctctgcccctgctgagcggcaccgttttcaccattcgctgtttcattaancgggatgaggttgtcaagattcagttgcgggaattgcagtctcagctgccattccggtttctctgtcagcgtgacctgtgcttgcccgctcagcgtactatcattggcggtcaaactaatttggttaaatgaaaggcgtttatgtgactcctgccactgggcctggaaactcccctgcccctgaataccttgttttggtaaatctgcaccctgcaactgccagttaatttgttcaatagccgccgttaaatcatgcggataatcagaagcatctaccgtaccgttaagggatatcgtgagatcgcgctgatcgcgattaacccgcccggaaaactcaaatgagccacgatgttggggatcttgttccatttgcaggcggatattgcggattgtcacctgctcgtcatcttcatgctggaacaccagcacgctgtccgccaccttaagactggatatatcaaacgaccatccgcgatcgtctgacagatccggcaaggtattgtcgcgcggtgcaaccggagcgtcttcactgcgcaccgcttccgtctgcggcgtcagttggatcactgccccttttagcatcacctgcttaacgctcagttgatgactcagtagtggtaaaagcgccacgtccaggcgcatgttgtcggcgcgaaccagtggctggctcgcgccctgggcggtgagagacattcgcccggagaggatactaagctgcggccagacgtgccaacgcagtggcccgtcgagctgcaattgataaccgctacgtgcagcaacttgcttgaccatatagtcgcggaaatcattcggattcaccagcaacactaacgcagataacccggccaccagcacgaccaggagtatcatcagcgtcgtcagaaatcgtctcatggtatcctcaatgggcctgaattagtctttatcgattcggctggctaccgcgccctgctggttgcgatatttcgcatcttcacggcggttgtaaggtcgcgccgccgggccggaaagcggctcaaagctcagcgcaccaattaacatgcccggacgcagcgccagcggcagcttaccggagttgtagaactccagcacaatgcaaccagaccagcccggatcgatacggtgcgcggtgacgtgcaccatcagccccagacgcgccagtgaggaacgcccgtccagccagcccaccagatcggctggcagcgtcaccgactccagcgttaccgccagcgccagctctcctgggtgaagatagaacgcctcnnnnnngtcgagaacgatctcatcgctcatcacgcggtcaagcgcggcgctcacttcatctntgggaccgctcagatcgataaacgctgccgtgtgaccacggaaggtacgaaatttattgcccaggcgcacatccaccgtcgcgccgttaatacgctccactggcggacgtgggttgatcgacaaacggccttcatcaagccaggcttcaatatctcggtcacacagacgcatggcattttctcctttcgcgcatcactcccttaacgccaattacgtcaagggcataccaggttatcactgaacggtacacaatttatcaaacttattcaaagaactgacttattttcgctttcaatatatcgatcgcgatgcggtttttcccgccncgcggcacgataatgtccgcatattgtttagaaggctcaatgaattgcaggaacatcgggcgcacggttttttgatattgcgccatcacggaatccattgaacgcccacgctcgttaacgtcacgcttgatgcggcgcatcaggcagatatccagcggggtatcaacgaaaatggagaagttaagttcgtcacgcaaacgtgcatccgtcagcaacaaaatgccttcgagaatgatgaccttcttcggctcaaccgtcaccgtttctttcatacgcgtatgttcaacatagctgtaaaccggcaggtcaattgccgagccgcgtttcaacgcttgtaaatgctcaagcagcaggctgtgatccatcgcgctgggatggtcgtagttggtcttaacgcgttcttccatcgacagatggctttgatctttgtaatagcagtcttcgggaattacgccgatgtgttcatcaccgacttgctcacgtaattcacgataaagggtactggcaataagactcttgccggaagccgatgcgccagcgataccgataatgacgcactgatgagactgatcagtcatatatttagcgacctgattaacctggatgttaggaagggggcgacgaagcgccaaacgcggcaattatagggatttcatccgcctgataccagtcgaatagcgttgccgcgcgctcagagttaattgttgacgaagaattcccggtggcaaattacgttgatcagttttatgtaaggtaaaaaatgttatacgcggttgcgcaaattatccgcctttacgtcactttatgagcaattcgcatataaaatgtaaaacttttgtactagcataaacacagaaacgaatactggcgacctggccttgcggataaagcggtaatgagcaaacaatcacagcatgtattaattgccctgccccacccgctgcttcacctggtcagtttaggtttagtctcgtttatctttacccttttctcgcttgagctttcgcagtttggcacccaactcgccccactgtggttcccgacgtccatcatgatggtggcgttttatcgccatgccgggcgcatgtggccgggaattgcgctgagctgttcgctgggaaatatcgccgcatccatcctgcttttttccaccagctcgctgaacatgacctggacgaccatcaatattgttgaagccgtggtcggggcagtgctgctacgtaaattgctgccgtggtataaccccttgcaaaatctggctgactggctgcgtctggcactcggcagcgccattgttccacctctgttggggggtgttctggttgtcctgctgacgcccggagacgatccnnnnnagggcatttttgatatgggtactgtcagaatccatcggcgctctggcactggtgccgctgggattgttatttaaaccacactatctgctgcgccatcgcaacccacggttgctttttgagtcgctgctcacgttagccatcacactgacgttaagctggctttcgatgctgtatctgccatggccttttactttcattattgtgctgttgatgtggagcgccgtgcgcctgccacgaatggaagcctttttgatcttccttactacggtgatgatggtgtcgctgatgatggccgcggatccctccctgcttgctacgccgcgtacgtacctgatgagccatatgccgtggctaccgtttttgctgatcctgctgcccgccaacatcatgacgatggtgatgtatgcctttcgtgcggaacgcaaacacatttccgaaagcgaaacccgctttcggaacgcgatggaatattccgctatcggcatggcgttagtgggcaccgagggacaatggctgcaatccaacaaagcactctgccagtttctcggttacagtcaggaagagctgcgcggactcaccttccagcaactgacctggccggaggatctcaataaagatctccaacaggttgaaaagctgataagcggtgaaataaacacctattcaatggaaaaacgttactacaaccgcaatggcgatgttgtctgggcgttgcttgccgtctcactggtgcgccacacggatggcacgccgctctattttatcgctcagattgaagacattaacgagctaaaacgcaccgaacaggtcaatcagcaactgatggagcgcatcactctggctaacgaagcgggcgggattggcatctgggagtgggaactgaagccgaatatttttagctgggataagcggatgttcgagctgtatgaaattcctccacatatcaaaccgaactggcaggtgtggtacgagtgcgtgctgccggaagatcgccagcatgccgaaaaagnnnnnnnnnnnnnnnnnnnnnnnnnnnnnnnnnnnnnnnnnnnnncaatcgcgctcgccctttangctggaatttcgcattgccgtgaaagatggcatccgccatatccgcgccctcgccaaccgggtactgaataaagaaggcgaagtcgaacgtctcctcggcatnaatatggatannnnnnnnnnnnnnnnnnnnnnnnnnnnnnnnnnnnnnnnaacagcttaacgaggcattgtttcaggaaaaagagcgcctgcacattacgctggactccatcggcgaagccgtggtctgtattgatatggcgatgaaaattacctttatgaatccagtggcggagaagatgagcggctggacgcaggaagaagcgttaggtgttccgctcctgacggtgttgcatattacttttggcgacaacggaccattaatggagaacatttacagtgccgacacctcacgttccgcgatcgaacaagatgtggtgttgcactgtcggagcggcggcagttacgacgtgcattacagtattacgccgttaagtactctggacggcagcaatattggttcggttctggtgattcaggacgttaccgaatcacgcaaaatgctgcgccagctgagctacagcgcctcccatgatgcactgacgcatctcgccaatcgcgccagttttgagaagcaactgcgtatcctgctgcaaacggtaaacagtacgcatcagcgacatgcactggtgtttatcgatcttgatcgcnnnnnagcggtgaatgacagcgccgggcatgcggcgggcgacgctttgctgcgcgaactggcgtcgttgatgctgagtatgctgcgctccagtgacgtgctggcgcggctcggcggtgatgaatttggtctgctgctgccagactgcaatgttgaaagcgctcgttttatcgctacacgtattatcagtgctgtgaatgactatcactttatatgggaaggccgggtacatcgggtaggtgccagcgccgggattaccttgatcgatgacaacaatcatcaggcggcagaagtgatgtcgcaggctgatatcgcctgttatgcctccaaaaatggtggccggggccgggtgacggtttacgaaccgcagcaagctgccgcacatagcgaacgggcggcgatgtcgcttgatgaacagtggcggatgattaaagagaatcagttgatgatgctcgcccacggtgtcgcttcgccacggatcccggaagcgcgtaatttgtggctgatttcacttaagctctggagttgcgaaggcgagattattgatgaacaaacatttcgtcgtagcttcagcgatccggcgcttagccatgctcttgaccgccgggtattccacgaatttttccagcaggccgcaaaagcggttgccagtaaaggcataagcatcgccctccccctttccgttgccggtttgagtagcgccacgctggtgaatgatctgcttgagcagctggaaaatagccctctaccaccacggttattacatctgattattccggctgaagcgattttagatcacgcagaaagcgtgcaaaaactgcggctggcgggatgtcggatagtgctcagccaggtgggccgcgatctgcaaatcttcaactcgctgaaagcgaatatggcagattacctgctacttgatggtgagttatgcgccaacgtgcagggtaatttgatggatgagatgctgattacgattattcaggggcacgctcagcgactcgggatgaaaaccatcgccgggccagtcgttttacccttagtgatggatacgctttctggcatcggcgtcaatctgatttatggtgatgtgattgccgatgcccaaccgctggatttgctggtgaatagtagttatttcgcgattaactgagggagcgtttgcccattgcctgatgcgacgctaacgcgtcttatcaggcctacaaatcgctcattccgcaaggcgctcgcaccgcttccggcgaccaacgtcatgcttcgtctggctgccagccttccgtataccagatatgcaacagcgcataagaacgccagggcttccagcgctcggcataacggcggatttgcgccggtgtcattcccggaaatcgctgtttaatcagataatcatccggcaggaaaacatctttcgcctgccagccacgtaaagcgnnataattcgccgtccagcgcccgatacccggaaaagtttgcagcgttttcatcgcttgttctacgtcgcccggtattgtcattggtaaggtgccctccagcgccgcatttgccagatgaatcagcgcctctgcccgtttcaacggcatgcctaacgcttttaatgcctgcgggtcggctgctgccagccgctgaggcgtggggaagcagatatactccggaaaatcatccagccgttcgccataaagttgtaccactttggcagtcaattttgccgccatcgccacgctcaccagttggcctaaaatcgcccgcacgccctgctcaaaagcatcaacacagccgggtaaacgcaatccgggccgcgccgcgcctaacctgcccaacgcaccgttaacaatctgcgggttacattgcagatcaaacaggcggctcattttcgccagacactctgcggcaacaggttctaaacctgcacttaaatttatgtgcagagtatggcgggctatatccggaatagcagtcaccacgccgcgatattcgcccaccgccagactacgggcataatnnnnnnccgcgaccgtttccacaccgctcactgcacgggcggcgagaaatcccaacatccacgaccagtcatacggcggctgccagttcagggtatacatcgcatctccttattcatccgctttcagcataaacgttattcagacgctgcgctttgctttcatattccggttgtcgcgacggcaacatttcgctaaagtcacgccccttcttcaccggcatggggattatttcgtgtttattggttttgattacggtacagcaaactgttcaatggcggtcatgcgtgacggtaaaccgcacttgctaaaaatggaaaacgacagcacgctgctgccttcaatgctttgcgcgccaacgcgtgaagcggtaagcgaatggctgtaccgccatcatgatgttccggcagacgacgatgaaacgcaggcgctgttgcgtcgggcgattcgttataaccgcgaagaagatatcgatgttacggcgaaaagcgtgcagttcggtctttcctcactggcacagtacattgatgatccggaagaagtgtggtttgtgaaatcaccaaaatcgttcctcggtgccagcggcttaaaaccgcagcaggtagcgctgtttgaggatctggtctgcgcaatgatgttgcacattcgccagcaggcgcaggcacagctgccagaaacgattactcaggcggtgatcggtcgcccgatcaacttccaggggcttggcggcgatgaagcaaacacccaggcgcaggggattctggaacgcgcggcgaagcgtgccggnnnnnnggatgtggtattccagtacgagccggtagcggcagggctggattacgaagcnacnttncaggaagaaaaacgggtgctggtggtggatatcggcggtggtacgactgactgttcattgctgctgatggggccgcagtggcgttcgcgtctcgatcgtgaagccagcctgctaggtcacagtggttgccgtattggcggtaacgatctggatatcgcgctggcgtttaaaaacctgatgccgttactgggcaggggtggcgaaaccgaaaaaggcatcgccctgccgattctgccgtggtggaatgcggttgccatcaacgacgtacctgcgcagagtgatttctacagtagtgccaacggtcgtctgcttaacgatctggtacgcgatgcccgcgaaccggaaaaagtggccctgttacagaaagtctggcgtcagcgtttaagctatcgcctggtgcgaagcgcagaagagtgcaaaattgctctttcaagcgtagcggaaacccgcgcctcactgccgtttatcagcgatgaactggctacgctgattagccagcaagggctggaaagcgccctcagccagccactggcgcggattctggaacaggtgcaactggccctcgataacgcccaggaaaaaccggacgttatctacctgaccggcggtagcgcccgttctccgctgattaaaaaagcgctggcagaacagttgccgggcattccgattgcaggcggcgatgactttggctccgtcaccgccgggctggcacgctgggcggaagtggtgtttcgttaattgaaaaatggctcagcagcggcttaaatctgcctgcgcctgagccagtttttctgccgcctgacgtaacggttccatcaacggcatggtccgtgctggagcatgaaggcggaatcgctgcaactctgtcgcgccgacagtcaacgtcgattccagccgatgtcgtttggcggccattttnntcattaccgcttgtctgtctgcaggcgttaccgcttcgttcggcctgaacacaaaacggcgttcacagctcgctttccagtcgataaccgcctgggtcagatggtcgccaaaccctttcacttgcttaacgccacgacgggtaacatctgctgctgtttcaataccaaaagaccgtaacgccgctttacgcgcaggaccaacgccgggaatagaggcagcatcaataaaaaatccctccagaaacttctgcttctgccgttcccttgcagtgtcgtgaagtgctgccagagcacgtttttcttcttccggtaacccgagaatttcgtccttcattttttcgagcatcgtccgtttggcgataaaaccttccagcccgcccaactgttggatctggctgactaaatggtcatagtccattttcgcgcgattaaatgcctcacggcgttgctggatttctgctttataagctttgcttgtcagactgccaataatccagatagccgccagcacaggaaccaaaataatataacgcggttctgcctgaaggccgcaaagcagcagcgataccgctgacagtgcgatctcaagcagaatgatgtattcgcgccgtaacaggcctaaaggaagcggcctgccagtcggttggaaatgatcgggtaatggcaattgcactgctggcggtgctactgacgccatcaccatcgcccagactttcgccagcacaaaatcaccgccggtggtaatgacctcttcgccgagatcaataaaatagataacgccttgattatccagcgtacaccacgggcagtcggtcaaatgagcgggataaacatgcattgccgaaacggtacatttctttaactgttggcgtnnnnnntccagtgctgctacccacgctttagccgtcggacgcncggttgcnacgccactttccgtaaacgcctgctgaaacatggcttcaacatcgcccggtaacatcgacagcggaatcgatcgtggcggcggttttaaaccacgtcgctggttgtctgacgcgtaggcataacggaaatgggcaatatccgtctccagcgcattacccgcatcagagataagcggcacaccagaataaggatgccgcccaccaaacaagacgtgaaaaatcagcaacgcaaggccaaaattatcgtgattcgcggtacgttcaaaaccgacaaatgacggcaaggtttgtagctctggcggcgtaaaatgcgacacgccgacttcgcataaatgcagtgtgccattggcgttaatctgaaaggagtcactatcgatcaacaccactttgctgtcgcgacctaccataaagctgttctggtttacgtcacccacgacgtgcccgtgctcgtgaaccgtagcaaaagatgaagcaatattacgcgcaacatagagtagaaaatcccacgcacaatgagggtaactctggcgacgatgtgccgggttatagatcatatgaatcggttctttaccagaaacttttggcatcataaaaccgataacttttccgcntcgtccaccgtgaagcgttgcctgcggccaggcgacataattcagcaacnnnnngtcagctgtcgcagccataaaggcaagtttgtcctgttttaaggcgggtggcggcgtgtgataaatcttggcgacgctatcggcaaactnnnnnatatcataaaccgcnccttcaccgcctttgcccagttcacggcctggcgtaacgcactcaccagtagcagtatataaagtgggtttcatggtaaccacagcgccagtgccaacgttttatcatcatcggtacgctcgtttaccgccgggctggacaaaaactgctttaacaattcaggtaataaatcgagctgttcctgcgttgctgccgccagcccattgaaaaaaggggtaaagaaaggcacatgcggagaattatccaacatatttaacgccagtcgctggataccatccgtaaatgctgcaactttatgcacacgctcagtgctggtgaaagtttccagtctggaaacggcatcttcatcggtaatgaaatgcgtcatattggcatattcacccaccatcggcgtaagcggtaattgcagaccgtgaccaaaatccaccaccacgccgccatcgccaatctgcataatcaaggtgccgttagccgatgaaatcaatcccagaaacgtgcaggcaaaatcgcgaactgctaattctttggcttccgcctcggcaaaaagtcgctgacgaacggtcagcacaatatccgtggcgaggatatcattgagtccaaattcaccgtgctgcactttttgcgacacataagccatcgcttcattgatggcaagcatcgcgccttcgccaccctgcgagacactgcctgcgccatcagtgacaaataccgacaataatggctgctggtcatttagccaggcaacctgcatctggcaggcatcctgacaaggtaaatcagcgctaatgtgcgacgttccaacagcggatgcataaaccagacgccagctcacactgacgtccagccttttggcgcttccagtacaacttccgttcccggcgtggagcgggaaaccgaacgcagtgaactggataaccagctaaacagttcgcggaattgtaatccctgcagagacaaaggctgacggacactgatttgggccagcgtcttcatatccgccccctgaacaccgatggaaaagaaggcaaacttcttatcttcttccccctgaaacactttgttggcggcagcctgccactcatcggttggtgcaccatcggtgatcaggaaaatccacgggcgataatacgaaataccatttgcacgatactcacgtttccgctcctctaccatatccagggctttggtaatggcggcacccattggtgtatcgccctgggcaaacaggatgggcgggaaaaaattagcggcgctggtaaagggttgttccacatgcaccgggccgaacgtcacaataccaagttccactctttttaaggccagcgggtcggcaagcagctcatcgcgaaaggtaaccaatccggcgttaagttcattaatgggtctaccgttcatcgaaccagaaacatccagcagcaaaatgcaggggcaacgtggttccgggttactggcaaaatcgctggtggcaaacgtgatttgttcgctcataagaaatccttttcttagagaattattgaggtccggtatcataccgattgcaataatgaaataagagcaaacgaagaaactttcagaattaggcccggcggcgcagaaaattttgctattcgcctcgcaagaacggagagccgtcgattgacactaaggacagagtgacataatttcaggagtgagggttagggagaggtttccccctccccctggtgttcttagtaagcctggaagctaatcactaagagtatcaccagtatgatgacgtgcttcatcatgaccctttccttatttaaggccccttcctcgggaggggctttcccgtttcagcgtcccgctgaaatcgtcggcttacctcctttcgccctgaattcagtctatcgctaacgcgtgaacaaaatagtttcctctgtgattattgcgtaacgtctcgcaaagaatatttgctggcaggatcgcagactgcaaagcctgcggattgacattctgaacgtgaaggcatactttcaggagtgagggtagagcggggtttcccccgccctggtagtcttagtatgctgggtagctaatcactaannnncaccacgatgatgagtatcttcatcatgaccctttccttatttatggccccttcctcgggnnnnggctttcccgtttcagcgtcccnntgaaatcgtcggcttacctcctttcgccatgcaagcagtctatcgctaacgcgtagataaaatantttcctgtgttattactggatgcgtgctcgcaaatgtgcccgccattcagacgattcccgatagtgtttcataattcctccatttttctcccttattggctggctacactagtatcattccgcgaaacgtttcaggaagagaaactcttaacgatgaaaggcagttataaatcccgttgggtaatcgtaatcgtggtggttatcgccgccatcgccgcattctggttctggcaaggccgcaatgactcccagagtgcagccccaggggcgacgaaacaagcgcagcaatcgccagcgggtggtcgccgtggtatgcgttccggcccattagccccgattcaggcggcgaccgccgtagaacaggcagttccgcgttacctcaccgggcttggcaccattaccgctgctaatactgttacggtgcgcagccgcgtggacggtcaactgatggcgttacatttccaggaaggccancaggtcaaagcaggcgatttactggcagaaattgaccccagccanttcaaagttgcattagcacaagcccagggccaactggcaaaagataaagccacgcttaccaacgcccgccgtgatctggcgcgttatcagcaactggcaaaaaccaatctcgtctcccgccaggagctggatgcccaacaggcgctggtcagtgaaaccgaaggcaccattaaggctgatgaagcaagcgtcgccagcgcgcagctgcaactcgactggagccgtattaccgcaccagtcgatggtcgcgttggtctcaagcaggttgatgttggtaaccaaatctccagtggtgataccaccgggatcgtggtgatcacccagacgcatcctatcgatttgctctttaccctgccggaaagcgatatcgctaccgtcgtgcaggcgcaaaaagccggaaaaccgctggtggtagaagcctgggatcgcaccaactcgaagaaattaagtgaaggcacgctgttaagtctcgataaccaaatcgatgccactaccggtacgattaaagtgaaagcacgctttaataatcaggatgatgcgctgtttcccaatcagtttcttaacgcgcgcatgttagtcgacaccgaacaaaacgccgtagtgatccccannnncgccctgcaaatgggcaatgaaggccattttgtctgggtgctgaatagcgaaaacaaggtcagcaaacatctggtgacgccnggcattcaggacagtcagaaagtggtgatccgcgcaggtatttctgcgggcgatcgcgtggtgacagacggcattgatcgcctgaccgaaggggcgaaagtggaagtggtggaagcccagagcgccaccactccggaagagaaagccaccagccgcgaatanncgannnnnnnngctcgctcctgatgcaggtgttacccccgagcagcacaagcggcccgtcgcgcctgtttattatgcgtcctgtggccaccacgctgctgatggtggcgatcttactcgccgggattatcggttatcgcgccctgcccgtttcggcgctgccggaagtggactatccaaccattcaggtggtcacgctctacccaggtgcgagcccggatgtcatgacctctgccgttaccgcgccgctcgaacgccagttcgggcagatgtctggtctgaaacagatgtcgtcgcaaagttccggcggtgcgtcagttatcactttgcagttccagctaacattaccgctcgatgtcgccgagcaggaagtacaggccgcgattaacgctgcgaccaacttgttgccgagcgatctgcctaacccgccggtttacagcaaagtgaacccggcagatccgccgatcatgacgctcaccgtcacctcaaccgccatgccgatgacgcaagtggaagatatggtggaaacccgcgtcgcgcagaaaatctcgcagatttccggcgtcggcctggtgacgctttccggcggccagcgtccggctgttcgcgtcaaacttaacgctcaggcgattgccgccctcggcctgaccagcgaaaccgtgcgcaccgccattaccggcgctaacgttaactcggcaaaaggtagcctcgacggcccttcccgcgcggttacgctttccgcgaatgaccaaatgcaatctgcggaagaatatcgccagttgattatcgcctaccagaacggcgcgccgattcgtctgggcgatgtcgcaaccgtagagcaaggtgcagaaaacagctggctcggcgcatgggcgaacaaagaacaggccattgtgatgaatgttcagcgccagcccggtgctaacattatctccaccgccgacagcatccggcagatgctgccacagctcaccgagagtttgccgaaatcggtgaaggtgacggtactttctgaccgtaccaccaatatccgcgcatccgtcgacgatactcagtttgaattgatgatggctatcgcgctggtagtaatgattatctacctgtttttgcgcaatattccggcgaccatcattcccggcgtcgcagtgccgctgtcgttaatcggcaccttcgcggtcatggtgtttctcgatttttcaatcaataacctgacgctgatggcgttaactatcgccaccgggttcgtggtcgatgacgccatcgtggtgatcgaaaatatttcccgctatatcgaaaaaggcgaaaaaccgttggcggcggcgctcaaaggcgcaggtgaaatcggctttaccattatctcgctgaccttctcgctgattgcggtgttgatcccactgctgtttatgggcgatatcgtcgggcgactgttccgcgaatttgctattaccctggcggtagcgattttaatctcagccgtggtgtcgctaaccctgacaccgatgatgtgcgcacggatgctcagccaggagtcgttacgtaaacagaaccgcttctcccgtgcctcggaaaaaatgttcgacaggataatcgccgcctatggtcgtggactggcgaaagtgctgaatcatccgtggctgaccttaagcgtggcgctcagcacgctgctgcttagcgttctattgtgggtgttcattccgaaaggtttcttcccggtacaggataacggcattattcagggcactttgcaggcaccgcaatccagctcctttgccaatatggcccagcggcaacgccaggtcgcggacgtgattttgcaggatccggcagtgcaaagtctgacctcatttgttggcgttgatggcactaacccgtcgctgaacagtgcgcgtttgcagatcaacctcaaaccgttggatgaacgtgatgatcgggtgcaaaaagtcatcgcccgtctgcaaacggcggtggataaagtgccgggcgtcgatctcttcctgcaaccaacgcaggacctgaccatcgatactcaggtcagccgcacccagtaccagtttaccttgcaggccacgtcactggatgcgctcagtacctgggtgccacagttgatggaaaaactccagcagctgccacagctttctgatgtctccagcgactggcaggacaaagggctggtggcgtatgtcaatgttgatcgcgacagcgccagccgtctggggatcagcatggcggacgtcgataacgccctgtacaacgcgtttggtcagcggctgatttccactatttatactcaggctaaccagtatcgcgtggtgctggagcacaacaccgaaaataccccagggcttgcggcgctggataccattcgcctgaccagcagcgacggcggcgtggtgccgttaagctcaattgccaaanttgancagcgttttgcgccgctttccatcaaccatctggatcagttcccggtaacgaccatctcttttaacgtgccagataactattcgctgggcgatgcggtgcaggcgattatggacaccgaaaagacgctgaatctgccggtggatatcaccacgcagttccagggcagcaccctcgccttcctgtcggcgctgggcagcactgtctggctgattgtcgcggcggtggtggcgatgtatatcgtgctcggcattctgtacgagagctttattcacccgatcaccattctctcgacgctacccaccgcaggtgttggcgccctgctggcgttaatgattgccggtagcgaactggatgtgattgcgattatcggcattattttgctgatcggtatcgtgaagaagaacgccatcatgatgatcgacttcgcgctggctgctgagcgcgagcaaggcatgtcgccgcgcgatgcaatctaccaggcttgtctgttgcgttttcgtccgatcctgatgaccaccctggcggctctgcttggcgcgctgccgctgatgttgagtaccggggtcggcgcggaactgcgtcgtccgttaggtatcggcatggtcggcggcctgattgtcagccaggtgctgacgctgttcaccacgccggtgatttatctgctgtttgaccgcctggcattgtggaccaaaagtcgctttgctcgccatgaagaggaggcgtaagtgaagttttttgccctcttcatttaccgcccggtggcgacgattttactgtcggttgccattaccctgtgcggcatactgggtttccgtatgctgccggtcgccccgctgccgcaggtcgattttccggtgattatggtcnnnncctcgctgcccggtgcgtcgccggagacaatggcgtcttccgttgccacgccgctggagcgctcacttgggcgcattgccggggtcagtgaaatgacctccagcagttcgctcggcagcacgcgtattattttgcagtttgattttgnccgggatatcaacngtgcggcgcgtgatgtgcangcggcgatcaacgccgcacaaagtctgctgcccagtgggatgcccagccgcccgacttatcgcaaagcgaacccgtcggatgcgccaattatgatcctgacgctaacctccgatacttattcgcagggtgaattgtacgatttcgcctcgacgcagctggctccgacgatttcgcaaatcgacggcgtcggtgatgtcgatgtcggcggcagctcgcnnnnnnnnnnnngcgtcgggctgaacccgcaggcgctgtttaatcagggcgtgtcgctggacgacgtacgcgctgccatcagcaatgccaacgtgcgtaaaccgcagggggcgctggaagatggcactcaccgctggcagatccagaccaacgatgaactgaaaaccgccgctgaatatcagccgctgattattcactacaacaacggcggcgcggttcgtctgggcgatgtggcgacggtgaccgactcagtgcaggatgtgcgcaacgccgggatgaccaacgccaaaccggctattttgctgatgatccgcaaattgccggaagccaatattatccagacggttgacagcatccgggcaaaattaccggagttgcaggaaaccattccggcggcgattgatctgcaaattgctcaggatcgctcccccaccattcgcgcctcgctggaagaagtcgagcaaacgctgattatctcggtggcgctggtgattctggtggtgtttttattcctgcgctcgggtcgcgccactattattcccgccgttgcggtgccggtttcgctgattggtacgtttgcggcgatgtacctgtgcggattcagcctcaataacctttcgttaatggcgctcaccatcgctactggtttcgtggtggatgacgccatcgtggtgctggaaaacattgcacgtcatctggaagcgggaatgaaaccgttgcaagccgcactgcaaggtactcgcgaagtcggttttacggtgctgtcgatgagtctgtcactggtggcggtgttcctgccgctgttgttgatgggcggattgccggggcgtctgttacgcgaatttgccgtgacgctttctgtcgccattggtatttcgttactggtttccctgacgctaacgccaatgacgtgtggctggatgctgaaagccagcaagccgcgtgagcaaaagcgactacgtggttttggtcgcatgttggttgccctgcaacaaggctacggcaagtcgctgaaatgggtgctcaatcatacccgtctggtgggcgtggtgttgcttggcaccattgcgctgaatatctggctgtatatctcgatcccgaaaaccttcttcccggagcaggacaccggcgtgttgatgggcgggatacaggcggatcagagtatttcgtttcaggcgatgcgcggaaaattgcaggatttcatgaaaattatccgtgacgatccggcggtggataatgtcaccggatttactggcggttcgcgggtgaatagcgggatgatgtttatcaccctcaagccacgcgacgaacgcagcgaaacggcgcagcaaattatcgaccgtctgcgggtgaagctggcgaaagaaccgggggcgaatctgttcctgatggcggtacaggatattcgcgttggcggacgtcagtcgaacgccagttatcagtacacgttgttatccgacgacctggcggcactgcgcgaatgggagccgaaaatccgcaaaaaactggcgacattgccggaactggcggacgtgaactccgatcagcaggataacggcgcggagatgaatctggtttacgatcgcgacaccatggcacggctgggaatcgacgtacaggccgccaacagcctgttaaataacgccttcggtcagcggcaaatctcgaccatttaccagccgatgaaccagtataaagtggtgatggaagtggatccgcgctatacccaggacatcagcgcactggaaaaaatgttcgtcattaataacgatggcaaagcgatcccactgtcgtatttcgccaaatggcaaccggcgaacgccccgctgtcggtgaatcatcagggattatcggcagcctcgaccatctctttcaacctgccgaccgggaaatcgctctcggacgccagtgcggcaatcgaccgcgcaatgacccagctaggtgtaccttctaccgtgcgcggcagttttgccggaacagcgcaggtgttccaggagacgatgaactcacaggtgatcctgattatcgcagcgatcgccacggtgtatatcgtgctgggtatcctttacgagagttacgtacatccgctgacgattctctccactctgccctcggcgggcgtaggagcgctgctggcactggagctgttcaatgccccgttcagcctaatcgccctgatagggatcatgctattaatcggcatcgtgaagaaaaacgccattatgatggtcgattttgcccttgaagcccaacggcacggtaacctgacgccgcaggaagctattttccaggcctgtctgctgcgttttcgcccgattatgatgactaccctggcggcgctgtttggcgcgctgccgctggtgttgtcgggcggcgacggctcgganctgcggcaacccctggggatcaccattgtcggcggtctggtaatgagccagctcctgacgctgtataccacgccggtggtgnatctatttttcgaccgtctacggctgcgtttttcgcgtaaacctaaacaaacggtaaccgagtaaatgacagatcttcccgacagcacccgctggcaattgtggattgtggctttcggcttctttatgcagtcgctggacaccaccatcgttaacaccgcccttccctcaatggcgcaaagcctcggggaaagtccgttgcatatgcacatggttattgtctcttatgtgctgaccgtggcggtgatgctgcctgccagcggctggctggcggacaaagtcggcgtgcgcaatattttctttaccgccattgtgctgtttactctcggttcactgttttgcgcgctttccggcacgctgaacgaactgttgctggcacgcgcgttacagggcgttggcggtgcgatgatggtgccggtcggaaggnnnncggtgatgaaaatcgtaccgcgcgagcaatatatggcggcgatgacctttgtcacgttacccggtcaggtcggtccgctgctcggtccggcgctcggcggtctgctggtggagtacgcgtcgtggcactggatctttttgatcaacattccggtggggattatcggtgcgatcgccnnnnnnatgttgatgccgaactacaccatgcagacgcggcgctttgatctttccggctttttattgctggcggttggcatggcggtattaaccctggcgctggacggcagtaaaggtacaggtttatcgccgctggcgattgctggcctggtcgcagttggtgtggtggcactggtgctttatctgctgcacgccagaaataacaaccgcgctcttttcagtctgaaactgttccgcactcgcaccttttcgctgggcctggcggggagctttgccggacgtatcggtagcggcatgttgccctttatgacgccggttttcctgcaaattggccttggcttctcaccgtttcatgccggactgatgatgatcccgatggtgcttggcagcatgggaatgaagcgaattgtggtacaggtggtgaatcgctttggttatcgtcgggtactggtagcgaccacgctgggtctgtcgctggtcaccctgttgtttatgactaccgctctgttgggctggtactacgttttgccgttcgtcctgtttttacaagggatggtcaactcgacccgtttctcctccatgaacaccctgacgctgaaagatctcccggacaacctggcgagcagcggcaacagtctgctgtcgatgattatgcaattgtcgatgagtatcggcgtcaccatcgccgggctgttgctgggactttttggttcgcagcatgtcagcgtcgacagcggcaccacacaaaccatctttatgtacacctggcttagcatggcgtttatcatcgcccttccggcgttcatctttgccagagtgccgaacgatacgcatcaaaatgtagctatttcgcggcgaaaaaggagcgcgcaatgaagttctggcggcccggtattaccggcaaactgtttctggcgattttcgccacctgcattgtcttgctgatcagtatgcactgggcggtgcgtatcagttttgagcgtggctttattgattacatcaagcatggtaatgaacagcgattacaactgttaagtgatgcgcttggcgagcagtatgcgcagcatggtaactggcgcttcctgcgcaacaatgatcgctttgtctttcagatcctgcgttcatttgaacacgataattcggaagataaacccggcccgggtatgccaccgcacggctggcgtacccagttctgggtggttgatcaaaacaacaaagtgctggttggtccgcgagcgccgattccacctgacggtacacggcgacccattctggtcaacggtgcggaagtgggcgcggtgattgcctcccctgttgagcggctgacccgcaatactgatatcaatttcgataaacaacagcggcaaaccagctggctgattgtcgccctggcaacgttactcgcggcgctcgccacctttctgctggcgcgtggtcttttggccccggtcaaacggctggtggacggcacgcacaaactggcggcgggcgatttcacaacccgcgtgacgcccaccagtgaagatgaactgggcaaactggcgcaagacttcaaccagctcgccagcactctagagaaaaaccagcaaatgcggcgcgattttatggccgatatttctcacgaactgcgtacgccattagcggtgctgcgcggtgaactggaagccattcaggatggcgtgcgcaaattcacgccggagacggtggcgtctttacaggcggaggtcggtacactgaccaaactggttgacgatctccatcagttgtcgatgtctgatgaaggcgctctcgcctatcaaaaagcaccggtagatttgatcccactgctggaagtggcgggaggcgcatttcgcgaacgattcgccagccgtggcctgaaactgcaattttccctgccagacagtattaccgtatttggcgatcgcgaccgtttaatgcagttattcaataacttacttgaaaacagcctgcgctacactgacagcggcggcagcctgaaaatctctgccgagcaacacgacaaaacagtgcgcctgacctttgccgacagtgcgccaggtgtcagtgacgatcagctacaaaaattatttgaacgtttttatcgcaccgaaggttcccgcaaccgtgccagcggcggttccgggctggggttggcgatttgcctgaacattgttgaagcacataatggccgcattattgctgcccattcgccttttggcggggtaagcattacagtagagttaccgctggaacgggatttacagagagaagtatgaccgagttaccaatcgacgaaaacacaccgcgtattttgatcgtggaagatgaaccgaagctgggacagttgctcattgattatctgcgtgctgcgagctatgcgccgacgcttatcagccacggcgatcaggtactgccgtatgtgcgccagacaccaccggatctgatcctgttggatctgatgctccctggtaccgatggcttgacgctgtgccgggaaattcgtcgtttttctgacattcctatcgtgatggtgacggcaaaaatcgaagagatcgaccgcctgctcggactggagattggcgcagatgattatatctgtaagccgtacagcccacgggaagtggtagcgcgcgtcaaaaccattttgcgccgttgcaaaccgcagcgcgagttgcagcaacaggatgctgaaagcccattgattatcgacgaaggtcgttttcaggcttcatggcgcggtaaaatgcttgacctgacgcctgcggaatttcgtctgctaaaaacgctctctcatgaaccaggaaaagtgttctcccgcgagcaattgctcaatcatctttatgacgactaccgcgtagtaaccgaccgcaccatcgacagccacattaaaaacctgcnncgcaagctggaatctctcgacgccgaacagtcatttatccgcgccgtttacggcgttggttaccgctgggaagccgacgcctgccgcatcgtttagttttagcgacattactttgttagccggagatggcgttcagaccagatccggcaacattatcccacgcatggtcagcaaactgacattatctctccgccctggcaggcatcagaaaatcgctcatactttaatcggtaaacagcacctttagatgctgttttcgatacgcaatttcaatcaaggagtcattatggctggttggtttgaactcagtaagagcagtgataatcagttccggtttgtgctaaaagcgggcaatggtgagactatcctcaccagcgagctgtatacttcaaaagcctctgcggaaaagggcatcgcgtcggtgcgtagcaacagcccgcaagaagaacgctatgagaaaaaaacggcaagcaacggcaaattctatttcaatctgaaagccgccaatcatcaaattatcggctccagccagatgtacgccaccgcgcaatctcgtgaaaccggaattgcctccgttaaagccaatggcacaagccagacggtgaaagacaatacgtaattacgatgccgggcgtgggttgttggcgtccggctttatttccaaataacgcttatttatttacctgcgccattaaaatagtggacactgatgaatactcattgtgctttctttgtttaacatctccatgcttatcctcctgaacatgttcatctgccaaaatatcttctaatacttttcgtgacgctatccggtttatgacatacactgatgtaagatttttacttacaggagagcataaacatggccagaacgatgacggttgatctcggcgatgagttgcgtgaatttatcgagtccttaattgaatccggcgactatcgcacccaaagcgaagtgatccgtgagtcactgcgcttacttcgagaaaagcaagcagagtctcgcctgcaagcgttacgtgacatgcttgcagaagggttgagtagtggtgaagctcagccgtgggaaaaggacgcgtttttacggaaggtgaaagcagggataaggaaataatgtgcgtattattaaactcatgccaaaagccaatgaagatttagaaggcatctggtattacagttatcaccatttcggcgaaccacaagccgacagatatgtggaacatctttcagacgttctccagattctgagtaacaataatgtaggtacgcccagacctgaattaggcgaaggtatttttgttcttccttttgaacgccacgtaatttatttcctgcaatcaccaggggaaattatcgtcattcgtatccttaaccaaaaccaggacgccaccagacatttacactggagctaaacccgccgattgcgctacaatgcccgcccttaaagtgggggcactcccctaaccgcttcatcaggtgaagcggatctgacctgtcatcagaacgagagaattatgtttaaaccggaactcctttccccggcgggaacgctgaaaaatatgcgttacgctttcgcttatggcgcagatgctgtttatgcgggccagccgcgttactccctgcgtgtgcgcaacaacgaattcaaccacgaaaatcttcagctcggcatcaatgaagcccacgngctggggaaaaagttttatgtcgtggtcaacattgcaccgcacaacgccaagctgaaaacctttatccgtgacctgaaaccggtggtggaaatggggccggatgcgctgattatgtccgatccagggctgattatgctggtgcgtgagcacttccctgaaatgccgatccacctctcggtgcaggctaacgccgtaaactgggcgacggtgaaattctggcagcaaatgggnctgacccgcgtgatcctctctcgcgagctgtcgctggaagagattgaagagatccgtaatcaggtgccggatatggagatcgagatcttcgttcacggcgcactgtgcatggcctactccggtcgctgcctgctctctggctatatcaacaagcgcgacccgaaccagggtacctgcaccaacgcctgccgctgggagtacaacgtccaggaagggaaagaagatgaagttggcaacatcgtacacaagtacgagccgattccggtgcaaaatgttgagccgacgctgggtatcggcgcgccaaccgacaaagtgtttatgatcgaagaggcccagcgtccgggcgagtatatgaccgcgtttgaagatgagcacggcacttacatcatgaactcgaaagatctgcgcgccatcgcccatgtagaacgccttaccaaaatgggcgtgcattcgctgaaaatcgaaggtcgtannnnntctttctactattgcgcacgcaccgcacaggtttancgcaaagctatcgatgatgccgctgcgggcaaaccgtttgacaccagcctgctggaaaccctggaaggtctggcgcatcgtggctataccgaaggtttcctgcgtcgtcatactcacgacgattatcagaactacgaatacggttattcagtttctgaccgccagcagtttgttggtgagtttaccggtgagcgcaagggggacctcgnggcggtagcggtgaaaaataaattctccgttggcgacagccttgagctgatgacgccgcaaggcaacattaactttacccttgagcacatggaaaacgccaaaggcgaagctatgccggtagcaccaggcgatggttatactgtgtggctcccggtgccgcaggatcttgagctaaattacgcgctgctgatgcgtaatttctccggggaaaccacgcgtaacccacacggtaagtgattaatttcgattatttttcccggatggaaaattcttagaaaccgatcacatacagctgcatttattaaggttatcatccgtttcgcagaaaaacataacccataaaatgctagctgtaccaggaaccacctccttagcctgtgtaatctcccttacacgggcttattttttatgcataagccctatccctggtcaccgtcttccattgaccacatcaatagaatctcccttcatagcacgatgcctttcacataacggcatcgtgctcgcccaggttccggctacgcacagccagaacgcgcatgtttgacgcttaccaaaaaatattctcactctccacatttgaatgtcagacgagcgacgccatgtaatcctgcaccttctgtcttcaggtcaactatctgcatttttttgccctgagtaacacagaaatgggctgcatcattttttactatattttctgcaccagatattctgcccctggctaaagaagcttcggcttcggtgtagtattggttatcgagtttacgctgaatattacttttatatgcaaggccaaatttactgatacttgtctcatcattatgcacagcacaaccagacataagaaaaacactaattaatgatatagcagctatcttgttcacctcaccttcccccattaaataccaacgacactctctagtgtttaaatataataatggcatgattattataattgaataggattataataaatgttctgtacaacatttcctacataagtaggaattacggacatggaggcccttccgggtaactccatgggggctttaatatattatattgaagatgccactgtttggttgaatattaggcatatgctcttttttgaaatttntcggtggctaccgttaatattcgctgttcccattgcaagctcctggtggtaaccactgaatcccccatacttgaactgactttttattctccgactttcatcctgttctgactccaccttttcttttctgctctacactatctacagaccaatcataaaggcacatacgatcatggcagaatttcccgccagcttactgattcttaatggcaaaagtactgacaatttaccattgcgcgaagcaattatgctgttgcgtgaggaaggaatgacgatccatgtgcgggtcacctgggagaaaggcgatgccgcacgatatgtagaggaggcccggaagttggnnnncgcaacggtgattgccggtggtggcgatggcaccattaatgaagtttctacggcgttgattcagtgtgagggggataacatacccgcgctgggaattttgccattaggaaccgccaatgattttgccaccagtgtagggattcctgaggcactggataaggcactgnnnntnnnnnntgccggtaacgccattgcgatagatatggcgcaggtcaacaaacaaacctgttttattaatatggcgacaggcgggtttgggacgcgtattaccacagaaacgccggaaaaattaaaagccgcgctgggtggcgtctcttacatcattcatggcttaatnnnnatggatactctgcaaccggaccgttgtgaaatccgcggtgaaaactttcactggcaaggtgacgccctggtcattggtattggtaacgggcgtcaggccggtggcggtcaacnnnngnnnnnnnnnnnnnnaattaacgatggcttgctgcaactgcgcatttttaccggcgatgaaattcttccggctctcgtatcaaccttaaaatctgacgaagataacccgaatattatcgaaggcgcttcgtcgtggtttgatatacaagccccacacgaaatcacttttaatcttgatggcgaaccgttgagtgggcaaacttccatattgaaatacttccggcggcgttgcgttgtcgattaccaccagattgtccactgttaaggtaagtacaaaacaagcgcagaagcaggatccgcaggccggcatcatcccaggattcttctgcgctcacaattttttcatgcagccaccgttgccattaactcttcaagtgatgcatacccgactaccgcagagttaaagcacggctgttgaaaatcctcggcgacaacaaccgttttaattcccgctgcctgtgcagctttaaaaccactcagactgtcttctataaccagacaatctgcggcgggcaggcgtaattttcgtagtgcggagaggtaaactgccggatgtggtttgccgtggctttcgtcgtcggcactgcaaatcaccgaaaaacagtgttcaattttgagttttgtcagtaccgcatcaatcacctgataagatgaagaggtcgccagtgccagttggtatcctgactggcataaaaaagtgagcacattctttacccccggcatggcctcgcctttttcagcaattaacgtggttatcaggcgacggatctccgcttctagttccgtgggcgtaatagacagatgacagtattcgcaccaggttcgggctatctcatcaagccttttccctttcgtcagttggatacactcttcatcgctaacgctggcaccccatcgtgccagcgctccttgttgcgcctgacgccataatccttccgaatcaataatgacgccgtccatatcaaaaataactgctttgcaattaaacatcgttcctcacaataaagcctggcattacaccaggcttgcctccatcaggaagccgtcncggcttcacctgctcttgatttctgggttgagaatcctggttgttcaacccgaataaacgggcaaataataaacgcgataatatacagggttgtataagctataaccacaccaattgtactgaaataaggtaacagcaccacggctatcgcaggggcaagaaagttagacagaccggcagaaaggttataaaccgaaatcgccgcgcctttgtgttttggctccagcgccgggaaaaccgccgccatcggcacgaacgctgcaacaaagatccccagcgcaacggcgggcaccattgccatccaatagttatgcccgaagtattgcggcatgtagtagaaagccagactggaaagtgccattcccacacagccgaaccagcgaacaactttcatccagccaatcttctctgccagtacgccccagaaaatgttggtaaaaattgtcgtgaagaagaagaccgcccacacctgtagccactcggacgtagtaaagcccagctcatcgacaaacatcatcggcataatcaccgcaaagccaaacagtgacaatgtattgataattcgcacaatactggagagcaaaatgttgcggttggtgtagagtaaggtgacagcacggccgagttcgctgaacttctctttggtcgtcagattttgcatatgatgcggagtctgaactttacgcatcgaaaccaacgcaagaatgccgccagttacgcaaaatgccagcgccagccacagggtgcccatttcgccgataaccggaatggtaaagctgggaatgtaactaccgaaaacgccaataccaatggagtaaaccgcccagaaccagcccagcgcggcactggtactgtcgctgcgcacgttatgcacaacggcaacgataaaggcgtaaaggaagagaggatatgccagaccacgaatgccatagaacagcagaattaatgcatagttcgcctgccccagaccgaagaccagaaacagcacatggaaaatacaccacagtacaaaaccgatgaacatggtcttttgcggcgtaataatttccgccaccacgccggatacccatgcagagagcgccgccgcaaggccatacagcgtaaaagcaaatgaagcttccgcaggcgtaaagcccagcgccttaatatagtgcgataggaatgccagttcaaaaccatcgccggtcataaagatagcaatcgctatatatccccagaccagatttaaaggtaatcccagccattgtttattgtttaacgacatagtgacctcgtttgtagggtacaaaacgccgctccggtgtcaccaccggagagcattaatgacagttgttattggttgcgatagttaagatcgttgttgtatagcgagttaaactgttgataacgttgcatcaaagcctgatggcgttcagcatcgctgtgccaggtttggtagatttccggtttttcgcagaccgccgtcagcggtttacctgcggcgagacaagccagacgcgccgcgccaagcgcaccaccggtttccccacctttatgcgttacaaccggcatgttgagaatatccgccagcagttgcgcccagaacggacttctcgcccctccccccaccagcgaacattgttcaatagccgttccactctcttgcagaacacgcagcccatcagcaataccaaaactcacaccttccagtacggcatagcccatcagtgctcgctggctggaatgggtcagtccccagaacatccctctggcatccgggtcgttatggggagtccgttctccggaaagatatggcagaaacatcggggcactggctttttctgctggtgaaagctgggctatctcttcgagtaactctgtttcggtaacgcccaccagacggcaaaaccattgcaagcaacttgcggcgctaagcatgacgctcatctgatgccataaattcggcagcacatggcaaaatgcgtggacggctgactgcggggccggacgataagcatcagtcaccacaaacagaacgcccgatgttcccagagaaatgaacgcatcgccgggagatactgcgcccacaccgatggcgctaaccgcgttatcccctccgccgccagctaccaccaccgaaggcgtcagcccccagcgttcggctacgcacggatcgagcgtggcagagacatcacaaccttccaccagttccggcatatttgcccgcgtcaggccgcacttttgcaatagcgagtctgaccagtcacgtttttccacgtcgagccacaacgtgcccgccgaatccgacatatcggagacttttttgccagtcattttgaagcgcaaatagtctttcggcagtaacaccgtcgcaatacgcgcaaaatgctgcggttcatggttccgtacccacaacagtttcggcgcggtaaatccgggcatcgccaggttgccagccactcgatgcagctccggtgctatctcttccagttcagcacactcaagagcactgcgggtatcgttccataaaatcgccggacgaatcgccttcccggcttcatccagcagcactgcgccgtgcatctgaccagaaaggccaatcgctttaatcgcctgccagtgctgaccgcatttttcccgtagcgttgacatcaggtattccgtcgcctcccaccaggcctgcggcgattgttctgaccagtgtggatggggccgctgaatagtcagcggcgcgctatgtgtggcgactatttcattgttttcatcaatgaccagcgccttaacttccgatgttcccagatcgatacccagatacataaccgcctcctggttaattaatcagcgcgtagacgtcagcaattttttcgcgcagcaacgcggcaaaatcagcacggtcggttaaatcgccgaacagtgccttgtcgctggcataaacggcaatcgggtctgcggattcgaacatcgcatgtaccgctggcgcatcaagaataccgtcctggtattcatacggcagtttgccgagatgccactgctgcataaacacatagaacaatgccggtaacatagcggtagcatttggacggacgccgcgctggtaacattcacgcaaagttggcgcaatcatcgccggaattttagagaaaccatcggcggcaacgcgctggttagtgtcctgaatatgcgggttggtaaaacgcctgagcaccacatcacggtaagtttcaagatcaatgccattgtcacccaggcaaggaatgacatcttccgttacgtagcgatcggcaatctgataaataaaatcagtcagcgtactttcgtggatatatttctgaccaaccagcgtacctgcccaggcgatacagctatgagaagagttgagaatacgaattttcgcttcttcataaggaataaccgactccaccagctccacgccgacattctccagtgccgggcgcacatcgcggaaattatcttccactacccactggataaaggtttcgcccatgaccggggctttatcactcataccggtttgcgctttgatacgttccggaagttctgtcgacgggcgtggcgtaatacgatccaccatagtattcgggcaggtcgcattggcgcttaaccagtcgataacggtctgtttacccgtaagttgtaagaactccaccaggccatcatggaaacgctcgccgttatgccgcacgttatcgcagttcagaagagtcagcggtccggcgttatttgccatacgtgcttcaagaatgcgggtaataacaccataaatggttttacattcgcccttgaggtcagcagctaaatcagggtttgtaacttccagcttatggctggtgttaaggtagtagccaccttcggtcaccgtaaaggcaatcactttggttttcgggtcagcaccttcggcaatcagcggttgtaaatcgacctgccagggcaacaatttctgaattgaagtgatttcttcatatacgctctccccttccgggctaaccgtttccagcacataacggcctttttgcgtcatcaacgcctgcacaacatgttcggcatcgttacgaatattgcctgctgcaatactccagcgcgcatctccccccgccagcaggcgatgcagataccacgcctgatgtgcgcggtggaaagaacctaaaccaatatgcagccacgtgtatttttcgttcattgtctattctccattgacgttatggctgcactgtaaatgaacatttgatttgaataagagctatagatcacaaaagagcaaatgctctataaaattacaaatgaccacatccaggtaaaaacttgcctcctggcagagctgtcgccaaaatgacgctatctgttgtgggatttttccattccgcacacaatcttgaggtagggaaacgtgaacaaagaagatgacatcaggctcgatcaaaaagtacgggcggcgtggatgtattacatcgccggacttaaccagagcgaaatcgccagtcagttagggacgtctcgtccggtagtccagcggctaattgcagctgctaaagatgaagggattgtgtcaattggattgcatcatccggtggcgaattgtctcgattacgcgcaacttttaaaggaaaagtactatttaaccgactgtaatattgtgccggtatacagtgttgaacgtaccctcgatagcgtgacatttggttgttatcaactgatggcgcgttatttacagggtgataaaccgactattgtcggtatcggttctggcttaaccttaaagaaaaccatcagacggattgattttgatagccaaaatacccgttgcgttgcattgatcagcgccatgaacgaacatggacaatgtaactattacgacgatgttccactactactggcgagaaaaattcagggcaaatattatcaatggcctgccccgcgctatgcccagtcacgggaagaacatcaaatgtggtcaaccaaccgactgttccgcaatgtctctgctgtcgcctgtaattccaatgttattttcgtcggcatcggtgcattaggtcgacaaagcccgatcttcaaagatggctttatcaatgaacagcaactggaagagttaacgatgctcggtggtgtcggggaaattctcgggcgctttatcgacgccgacggcaatgtggtggaaagccatattaaccggatgatcaccagctacgatatccgcgaaagtcagtgtccgcgaattgccgccgcctgcggtgaagataaacgcccggctattctcgcggcattaaaaggcggatggatcaacggcctggtgaccgatgaacacaccgctcgttggttattgactcgctaagtcaagcaaccacattcagactggggatcaattccggtgagatctcaatgcgccgcaccgtggtgtcaccggaatctataatctcaaacaccttctccagcatggcaggcacatcctgacgcaccatgtcgatatcatgcctcagcagagaaacaaacggatcccagtcaaaacagcccatcggcggttgattggtccccgtctgtcccgtttgcgccagccagcgcacaacgccttcaagagaaatggttgagttgacaaacagaccgtgaagcggcatcgctgaggagtgaaaaacgtctttcaacaatccttccactcgtgcggaagagtagccggtaaccagtttatgattatccggaacagttaatccaatcgcctgatgagcatcgacaaaaccgcgtaaacgctcagcggtattgttatcactgatacgcccgccgacaaacaccagcgcgcctgatttgccgtaacgtttctggctattagccaaaatgcgttcggtcaataatttcgcgcccgtgtagttatcagaaataatcgacggtgccagcgtccccggcagatccagattcagtgtcggcactcccgcctgctggcacatctgcgctattttatccggctgtgtggccccggttgctatcacccaatcgacctgccaggaaagcatggcgcgcacagcttctatctccagttctggttgtcgccgcgtacaggtgatgatgggcaataatcctctggcgnnnnccatctcttcaaatttttcagcgacagaaccgaagtatcggttgtcgtatttcggcacaatcatgccaatcacattggattttttactacgcagcaaactagcctgacgattgaccgcatagccctgctcttctgcgatacgggtcaccttctccgccagttttacgctgatacggcgcttcttccagttaccattcaaaatcgcgctcaccgcactggcagaaacgccggttaattcggccagatcgtagatggtcgttttcttcgttttctcaacgctcgccacaaatttgcctctttaatttgaatgtttcttgccgggaatttcagcgagtgctacatcagcttcatcgattgagcaacttgcttcacgcgctaacaaattccgtcgttcagccagtgcaagcaaacaaagactaaaaaaactcagagaaaggattataaaatgaatcactctgtaccctctatgaatacttcccttaacggtaaagtggccgccattactggcgcggcatcaggaatcggcctgcaatgcgccaaaacgctgctcgaggctggagcaaaggttgtcctgattgaccgcgaaggcgaaaaattgcaaaaaattgtcgtcgaactcggtgaaaacgcatatgcgctacagatcgacctcttcaacggcgagcaggtagatagcatgctggcgcgcatagtagaactggcgggcgggctggatattttccatgccaatgcgggcgcgtatattggcggcccggtggcggaaggcgatccggatatctgggatcgggtgtaaaatctgaatattaacgccgcgtttcgctgtgtccgcgccgtcctgccacatatgattgcgcagaaatcgggcgatattatctttaccagctctatcgccggtgtcgtgccagttatctgggaacctatctacaccgcgtcaaaatttgcggttcaggccttcgtccacacaactcgccgccaggtttcacaatatggcatccgcgttggcgcggtgttgccgggtccggtggttaccgccctgctcgacgactggccgaaagccaaaatggatgaagccctggcaaacggtagcctgatgcagccgatcgaagtagcggagtcggtgctgttcatggtcacccgttcaaaaaatgtcaccgtgcgcgatctggtgatcctgccaaacagcgttgatctgtaagggcgttactatgactgcaaccaaaactgtcatcggtgtcgatgtgggttcaggcagcgtccgggctggggtttttgctctccagggctcgttacttgctcacgcggcacacaaaatcacgaccacccgacgcagcggtagccgcgtcgaacagtccagtcagcaaatctggcaggccctttgttcaagcattcgggaggcattgtcaaaagcggatgtctctgcacagagtgtcgcgggtattggctttgatgctacctgttctctggtggtgctggataaaaatggtgaaccgttgccggtcagcccggaaggtgaagcgcagcaaaatatcattgtctggatggatcatcgtgctaccgaccaggcaaagcgaatcaatgccacacatcacccggtgctgaaatacgtcggcgggatcatttcgccggaaatggaaacaccgaagctcctgtggcttaaagaaaatatgcctgaagtcttcgatcgtgctggatatttcttcgatctggctgattttctgacctggcgcgccacgggggatctggctcgttcggcctgtaccgtgacctgcaaatggacgtggctggctcatgaaaatcgctgggatccggactacttccacaccattggcctgacagagttagctgatgaagaatttgcacgtatcggtcagcatattgcatcaccaggaacgccctgtggcaatggcctaaccgagcaggccgcagaagagatgggattactccccggcacaccggttgctgtcggtcttattgacgctcatgctggcggcattggtacagtgggcgtggaaggtggagcgcttaataatctggcttatgtgtttggtacatcttcctgcacaatggcctccgttaccgatccgctttttgttcccggcatctggggaccgtactataacgttatggttcctgggttatggttaatcgaaggcggacaaagtgctgccggtgcggctatcgatcagttactgtcgttccatcctgcgtttgatgaagcaaataaacaagctcagcaggccggacaaccattaccggtatggcttgccgaccaaatcctggcaaaaacggcgcaaccgtccgatgccgtggcgctggcaaaaggtttacatgtggtgccggaatttctcggtaatcgcgctcccttcgccgatcctcatgccagagcggtgatttgcgggctgggtatggagtgcgatcaggataatttactcgctctgtatgttgccggattatgtggcatcggctatggtctgcgacaaattcttgatgcgcaatccgctctgggcgtggtcaataaaaatatcgtcattagcggcagtgccggtcagcacccactggtgcggcaaattctggcagacacctgtggtctgccggtcattaccacgcagtgtagcgaaccggtattattaggctcggcaattctgggagctgttgccgggaaagtttcaccttcggtgagcgacgccatgcagcaatttacccatgtggatacgcaatattacccacaacaaaattaccagacgctgcataagcagcggtatgaggcttatcagcaattgcaggcgctggcaaaaaactgtcgggaataaataaaaaaaccgggaccccttgaagttcccggttttattgcccacaaaattgagaataaactacaccgtaattaattttacccgtgtcttctgcaatgccagtttgtccacctctgacacagcatcatcggtaataataatgtcaattttttcgattggcagtacctgattaaaaccgcgacgattaaatttcgatgaatcgagaacggcaatcactttatttgcggcggtgaccatcgccccgctaatcgaataaccttcattaaaggtcgtaataccattaaccgcatcaataccatcagcaccgacaaacattaaatcggcattaatatcctgcaatgaacgctcggcaatggaaccatgcatcgagcgcgttttatggcggaccgtgccaccacagacgaccagagtaatgtctttattttcggaaagggcaaacgctgccgggagactgttggtaatcaccgtgatatttttggcggtcattaatccttcggcgataagcattgtcgtacttccgctgtcgagaataacggtcatcccttcgtggatcattttgactgccgcctgcgctattctgttttttggcgcgctggcgagctgaaatcgctctttaaacccgacttcctgggtctcggtttcactattaccggacattattttcgccgcaccgccatgaaagcgtgtaaccacgcctttttgttcgagaaagcgcaaatcggcacggattgtcgcttccgaggcagcaaatactcccgccagatcctgaacaagcacggttccctgttcattcactaattggatgatcttattccttcgctcgaatgaattcatcgtcatttacccatattcaattgtggctagtgtaaacgaagggggaccattggtgaatgatctgttttgcacaataccgggccagcatcacgctggcccgcggtttcagggaatgagcaacactttgcccggcatagcattacgagcgatgtcacgcaccgcctgggcgaagcattcaaagcttccacggtgagcgattaatggctccaggcttaacttacgttctgtcagcaaccggctcgccgtttcccactcctgccccggccaagggctggagtagttcatccaactgccgataaccgtcagctctttacgcaatattttgccaaacgttgccgatgttaaatgcagatcctgatgcaacgtccccaccagcgccagttgggcatgaggaccggcaatctctaccgccagttccacagtttgcggtacgccagccgtctcgaggataagctgattaaagcgcagctcgcgtaaaacgccctgcatttgcgnnnnnnnnnnnnnnnnnnnnnnnnnnnnnnnnnnnnnnactgttaaatgtttgcatcgcaccgaaagattttgccagtgccagtttttctgagctaatgtcgatcgccgtcacactctttgctcccagcgcgacagcgcactgaatagccagcaggccaatggttccggcaccaannnnnnnnnnnnnnnnnnnnnnnnnnnnnnnnnnnnnnnnnnnntttattctcacaaccttgcgctaaatgaaaagcatgcaggccaacggtaatcggttcaataaaagccccatcctcaataggcatatccgtgggtagagcaaagacatttttccgcttaacgacaatatattcggcaaatccaccatcacgccgtgagccaataaaatcatattttgcgcactgggaataaaaccctttcagacactctggacaagtaaaacagggtaataacggcacacaggcaaccgcatcgccaggatgtaaatcatcaacaccggatcctaccgcatcaatatagccgctaaattcatggcctaacgttattggataataatgtgcaccatttttaaatatcctgggtaaatcggaaccacataagcccgagctggcaatttttacccgcacctcatcctgatgtttaatttcaggaatgacgctttctgcaacgcgcacgataccatcagtatcattcaccactgatttcataaaaactcctgattgttaagggggataacctccccctcaggtaaaaattattctgcgagaacggctttctcttgtttaataaagccacgcgctctacgccaggtcatgaaaataccggtcagataaattgcnccgataataatgaaaccgggaatattttgcggggagaaaacctgaatcagtaaccaggtaatgggagaaccgccctgatccattgaagccaccatacccccggcttttaacgccccagcattagccgccagttgggtgtgcaaaccaatagtttgcgtcgagatccacagggtgatgctcataatgatgacacccgagattaaggtgcggaacagatttccacgatgcaccgcgaccgccatcgccacaaagaagccgatagtggcaagatcgccaaacggcagcacctgattacccggcacacaaacagcaattaaaatggtgagcgggataaaaatcaggcttgccgataccaccgccgtatgccccagcagtaatgcgggatccaggccaatcaggaactcctgaccgccgaacttcgcctgtaaacgactacgggcctgcttagcgatgggcgttaaaccatccatgatgggtttaatcacccgtggcatcagcagcataactgccgccgtttttaccgccagctgcaatacacctttgacatcgtaatccgcgaggatgccgataatcagccccatcacaaaacccacggtgacaggctcgccaaacgggccaaatttgcnnnnnnnnncgtcggcgctaaatttaatacggtttacgcctgggattttctcgataatggcatcgaccagcaccgcaatcggccccatatacgccgacgtaccgtgcggaatagcaataccttccagctcaaagaaatttcgggtatcgcgggcaaaccagtcgccgagcttataaacaaacgccgcgtgaattaccacacccgccatccctatcatccatgaaccggttgccagatgcagcaacgcgccggtgaaggtcatatgccagatattccagatatcaacatttaccacccgcgtcatacgggtcagtaacatcgccacgttaaccagaatcgcaatcggaatcgccaccagcgcaatttgcgacgcccaggtcattggtgaagagcccggccagccgacatcgaccacatgcagattcaggtcgaaattttccgccatcgctttcgccgccgggccaatggaatccagcattaggccaatcacaaggccaatgccaacaaagccaatcccgatatgcagacccgctctaaagcaatcgcctgccttcatgcctaaaattttagaaaaaataatgatgacaatcggcaacatcaccgtagggccgagatcgagaatataacgcatgacttctgaaaacataggtcacccctgtaagatagtcagaattttattttgtaatgcttcgataccgacaccagaaacaaaaggcatgccgtgaactaacggaatatcgccaaaactacggtcaactttggcggtagtacatatcaaatgcacaccatccatataggtttctatttcattaacccgacactggattaattcaacaggaatattatgactctgacacaactctttaatttcttccgccgccatcgtagaggtcgcaaccgcgcctccgcaagcgacaataatcttgcgtttcataaatagtcctttttattgttacagagggatttattcgtctgaatctaaaacatactttgtgaagtattcctttaactgagtttcaggaagagtgattagtgtctcaacgatatcgggctgttgtaacttgccaaataaacagcgtaaaagtttcaattgctgctgcggattttccacaatcaacgaaataaccaacgataccgccacgtcattatcatcatccgcttgctgaaaatgaactttatttgttagccttaacagataaatggctgacgacttagcatgaatcgcctcacaatgcggtattgcaatggcgtgctgctcaagcattatcccggtagggaattctgcttctctggcaattaatgcctgtggccaggtatcatgaaccacacctttggcgagcatctcattaccgatatgggttaaaacttcgctacgatcgacaaaagaaattccgctacgaacaaacaggttagtcatataccgtccttattccgcacagccgtagcgataggcgcgcaaaacatcataaattttatccataatcagctgatgcggtattgctgataattccccggactgaatgcgttcaaattgtttgggaagatactgactaatcatgcccagtgggatgtccacgccttgcagattcaccatcatcgtttcaacgctatttttaatccgactatgcggccagtaataacgaatacgatccgacaggctgtaacgaatatccagtaatgaatcgttaaaacccgtgcgataatatttcttccagtactgcggttcgtcgagcatcacttcttcaattnccgccaggcaaccgctgcgattttcgggggcgataagttcctgctcaatttgcgccagcgcaaatatcgcctcgcgtaaagcaaaggttaatgcgggaccgactttcaatattgcaaagtgatcgcggactaattcccaataagccgtccgggtctggtaatcggtagaatgtgcttcataaaccattcgggtgttttctatccattgcgccagcgcctgcgcttcctgcggctgataatggataatattgctgtgatcaaattccacacccggctgcaccacgatggcaatcacgcgtgttaacgcctctgtcagcccacgggcaataaaggccttttgatgcgtacgtaaagtattggcggcatcttcaacatgggtgatgtgtactgactgaatggcgctggcctcaccgcccggaaccggaacttcggtgccaatgacatagctcagttgctcacgctggcaatctgtcgccacactttccgcagcaaagcaaagcacagcagctcgttccgcaaccgtttctggtgctaacggtatgggatcccccgcgcaggacattgacgcatcaagatgaattttactgaagccagcacgaacatatgcctttaccagctcgacggatttttccatcgccgcatccgcattttcttgctgccagcagtttggccccagatgatcgccgccgagaataatgcgttcgcgtgcaaacccaactttatcggcaatcgtaaaaacaaattcgcgaaagtctgccggtgtcattccggtataaccgccaaattgattgacctggtttgacgttgcttcaatcagcactttgcgcgtgctgttgcgatcaaatgccagcgccgcttcgataaccaacggatgggcagaacagactgaacatatgccgatatgttcaccagctttatgccgggcaattaacgttttcatgttttttccttgttaaatggcaggtgcgttatgccctgccctcgcagccacaatcggcaatcactttgctcaccacatcgcgcattgcggatttagccgactgcaaataatcccggggatcggtcgcttcggggtgctcggtcaggtaattttttaacgcctgcgagaaggcatttttcagctccgttgcaacgttgattttgcatatccccagtttgatggtttgctgaatatccttagtcgataaccctgacgcgccatgcagcaccagcggtaagttcacccactggcgaatgttctccagtcgagaaaaatcaagcgccggtgcgctggcatacataccatgagccgtgccgatggcgaccgccagggaatcaattccggttgcctcggcaaattcncgcgcctgagcggggttggtataaaaagcatcggcttcattgacttgcacatcatcttcctggccgccaagttgccccagctccgcttcgacgctgacatcaaagcgatggcaaaaatccaccacctctttgacccgtgaaanatnnnnngcaaaaggcaaatgcgaggcgtcnatcatgactgagcgcacgccagaacgaaccttctgagcgatatcgtcaaatttcgtgtgatggtcgagatgaattgccagtggatggtgatattgcttcgccatcgcgctgaccagcgccatcagattttctgtaccagcatgagtaaatgtgccaggcgttccggcgatgatgaccggcgcatgcaggttggcagcggtttctaccaccacttgcatcgtttcgagattgtgaatattgaatgccggaaccgcataaccgccgcgctgtgcgttgttcagcatctgctttgtcgataccacgtacattttcatatcctgtcgtttgctttcgatttcaaaatataatgaaatgatttgtttttaaatgtcgagataacgatcacaaaaacgacaatatgaaaattgttcgaggagtgaaaggcaaaaaaaacggcctcccgggggaagccgtaaagaagtgcgcgtgtttttatgtcggatgcggcataaacatacgtggcagcgctgtgtaggcatgataagacgcgtcagcgtcgcatcaggcataggttgccggatgcgacgtaaacggcttatccgtcctacggggtagtgctgttagtatgaggcgtatcaggcgatagtaattttgctatcgagataaacgtcctgcacggcgttaatcagtttcacgccgtcagccatcgatttcttgaacgccttacgtccaagaatcagccccattccgccagcgcgtttgttgataaccgcagtacgcactgcatcactgaggtcagtttcaccgcctgcagcaccaccggagtttatcaacccggcccggcccatatagcagttagctaactgataacgcaccagatcaatcgggttttcgctggttaacttgctgtacacgcgatcgtcggtataaccgtaattaattgctttatagccgccgttattttccgccattttttgtttgacgatatctgcacctatggttgccgccagatggttcgcctgaccagtcaggtcggcggagacatggtaatcaacgccatctttcttaaaggcggagttacgcaaataggcccacagcactgtcaccatgcccagctcgtgcgcacgttcaaaagccgcaganatttcttcaatctggcgacgtgactcttccgagccaaaatagatagtcgcaccaaccgccaccgcgcccatgttgaacgcctgctccacgctggcatacagcgtttgatcgtaggtattcgggtaacttagcgtctcgttgtgattaagtttgacgaggaatggaatgcgatgcgcgtancgccgcgataccgacgccagcacgccgtaagttgacgccacacagttacagcccgcttcgatcgccagttcaacaatgtttttcgggtcaaagtagagcgggttagcagcaaatgaagctccggcagagtgctcaacgccctggtcaaccggcagaatagaaagatatcctgtgccagccagacgcccggtgttgtacaacgtctgcatattacgtaacaccgctggcgggcgattattgtcaatcatcacgcggtctacgtagtcatgtccgggaagataaagctggtcagaaggaatagtcatacaacggtgctgtaaaaggttgtcggcgtctttgccaagcaactgcgcaatatctgtcattactatgctcccgtaaattccgattggatatcggctatggattgtcctggcccgccttttgcgggcaatcataatcctggtcgttacgggcgagtttttccatcttttggatgttttttcagcgttttctgttggctcgattcatcagaaaaaatgttagnnnnnnnnnngttttcaccgcaaaggtatttaaaaggtattattaagtggtattatcatcgcgtaccttacattacctgtcatgaaggaattaaaagatgaaaacaanagcaaagctgtcgttcatgatgtttgttgaatggtttatctggggcgcgtggtttgtgccattgtggttgtggttaagtaaaagcggttttagtgccggagaaattggctggtcgtatgcctgcacagccattgcggcgatcctgtcgccaattctggttggctccatcactgatcgctttttctcggcgcagaaagtgctggcggtattgatgttcgctggtgcggtgctgatgtatttcgccgcgcaacagaccacttttgccgggttcttcccgttactgctggcctactcgctaacctatatgccgaccattgcgctgactaacagcatcgcttttgccaacgtgccggatgttgagcgtgatttcccgcgcattcgtgtgatgggcactatcggctggattgcctccggtctggcatgtggtttcttgccgcaaatgctggggtatgccgatatctcaccgactaacatcccgctgctgattaccgccggaagttctgctctgctcggtgtgtttgcgtttttcctgcccgacacgccaccaaaaagcaccggcaaaatggacattaaagtcatgctcggcctggatgcgctgatcctgctgcgcgataaaaacttcctcgtctttttcttctgttcattcctgtttgcgatgccactggcgttctattacatctttgccaacggttatctgaccgaagttggcatgaaaaacgccaccggctggatgacgctcggccagttctctgaaatcttctttatgctggcattgccgtttttcactaaacgctttggtatcaaaaaggtattattgcttggtctgatcaccgctgcgatccgctatggcttctttatttacggtagtgcggatgaatatttcacctacgcgttactgttcctcggnattttgcttcacggcgtaagttacgatttttactacgttaccgcttacatctatgtcgataaaaaagcccccgtgcatatgcgtaccgccgcgcaggggctgatcacgctctgctgccagggcttcggcagtttgctcggctatcgtcttggcggtgtgatgatggaaaagatgttcgcttatcaggaaccggtaaacggactgactttcaactggtccgggatgtggacttttggcgcggtgatgattgccattatcgccgtgctgttcatgatttttttccgcgaatccgacaacgaaattacggctatcaaggtcgatgatcgcgatattgcgttgacacaaggggaagttaaatgaaaacagaacgtattctcggtgctctttatgggcaggcgttaggggatgcgatggggatgccctccgagctttggccacgcagccgcgttaaagcacactttggctggattgaccgttttctgcctggaccaaaggagaataacgcggcctgttattttaaccgcgccgaattcaccgacgatacctcgatggcgctgtgtctggcggatgcgttactggaacgtgaaggcaagatcgacccgaatctgattgggcgtaatattctcgactgggcgctgcgtttcgacgcctttaacaaaaacgtactaggtccgacctcgaagattgctctcaacgccattcgcgacggtaaacccgttgctgaactggaaaacaacggcgtgaccaacggcgcagcgatgcgcgtctcgccattaggttgtttgcttccggcgcgtgatgttgattcctttattgatgatgtggcgctggcgtccagcccgacccataaatccgatctggcggttgcaggcgcggtagtcatcgcatgggcgatttctcgtgccattgacggagaaagctggtcagcgattgttgattcactgccttcaattgcgcgacatgcacagcaaaaacgcatcactaccttcagcgcctcactggcagcacgtctggagattgcgctgaaaattgtgcgcaatgccgacggcactgaatccgccagcgaacagctttaccaggtcgttggcgcaggtaccagcactattgagtccgttccgtgcgccattgcgctggttgaactggcacaaaccgacccgaaccgttgcgccgtcctgtgcgctaaccttggcggcgacacagacaccatcggcgctatggcgacggcgatttgcggcgcgttgcatggcgttaacgctatcgatcctgcgttaaaggcggaactggatgcggtaaatcagcttgatttcaaccgctatgccacagcgctggcgaagtatcgccaacaacgggaggtggtatgagcggcgctcgattacacacgctgctgcctgaattaaccacgcgtcagccggtgatggtcgtcggcgcggcggtcattgacgtgatcgccgacgcttatgccctcccctggcgtgggtgcgatatcgaactgaaacagcagagcgttaacgttggcggctgcgcactgaatattgccgtggcgttaaagcgcctcggcatcgaagcgggtaatgccttgccgctcggtcagggggtatgggcggagattattcgcaaccggatggcaaaagaggggttaatcagcctgatcgataacgccaaaggtgataacggctggtgcctggcgctggttgagccggatggcgaacgcacttttatgtcattcagcggtgtggaaaatcagtggaatcgccagtggctggcgcgattaaccgttgcgcctggcagcctgctctatttttccggttatcaactggcctcgccctgcggcgaattattagtggaatggctggaaaagctgcaagacgtgacgccgtttatcgattttggcccacgtattggcgatatcccggatgcattactggcgcggattatggcttgtcggccactggtgtcactcaatcgtcaggaggctgaaattgccgccgaacgttttgctttatccgcagatatcacgacgctcggcaagcaatggcaggagaaatttgtcgcaccgctgatagtccgtctcgataaagaaggtgcctggtatttcagcgacaacgcttcaggctgcgctccggcatttccaacgcaagtcgtagacacaattggcgcgggcgatagccacgcaggtggcgtactggccgggctggcatctggtctgccactggcggatgccgtattactgggcaatgcagtggcgtcgtgggttgtcgggcatcggggcggtgattgtgcgccaacgcgcgaggaactactcctcgcacacaaaaacgtatagatcgctgcgacagtggctaatgctgtattcaataggccgttgctgttggtcaagcgccacttgcttgatcaccagcaccggtattttgctatctaactgaatatgtgactgaaactcggcatctggcatccgggcgctaacgcgggaacgggtgcgttgtgggtagatgtgctggctgcggaagtagtcataaagagaaattccgatggcatcaacatcatgaattaaatgcgccggaacccacgattcctcaatcgataccgcttcttcatcgacatagcgaatacgcttaagcaaaaagacatcacttcccgcttcgaccgccagctgctgcgcgacttcttcgggacatttcacgacacgcttgttaacccatagcgtatcgggctttttcccgcgcaataccacctgctgagaaaaacctcgcgcttctttcaacgagtattcgaagatgttgttgatctgcgtgccgtaaccgcgcgaacgcgtcaccacgccctcttcttccagcgcctgcatcgccttgcgcaccgtaatgcgtgaaacgccggttaactgacttaaatcacgctcaccgggcaaaatattgccatgctccagcaccccgctgcgcacggcattttttaccgtttcggcaaacttaatanannnnggcgtnttatccgccgctaaaatacgctcgttcagttgggcaatcagctgggtatgcgcttgttccatttgtctttttcctgccagggagtctggtgggagtatatcactgcttcttatttaaggcgtttctttaatcccatcaacgaatgcctgcaactcctcnnnnntgccattaaacacattaaaatccaccggaccattgatgccatctacctgtccacggtcggaatgctgccagangcgccaggccatgccgtcattgtccggacgacgttgatagtagtgagccacccaccacggatattcattgaaatagcccgccagattcgtgtgataaaaaacggctcctgagtaaataatcggctttttccccgtacttttttcgaccatttttagccactgacttaccctcttgcgtaattcttttgccgataattttccccgttcttctacgtccagcacggcagggaaatcgccttgtgagaaatccaccgtttgcagaaataatcgcgcctgaacaggcgctgctaccgacggggagaaataatgatacgccccgcgcagcaggccattttcgcggcttagttgccagttacgcgaaaaataggggtccaccagcttttcgccttccgtcgccnnnnnaaangcaaactgtaagcggataccgttgtcgcgcatttttgccacccgctgccagtcgatccgctcctgccagcgcgaaacatctattccgtgaatggtgtaactggcaggaatgcgaatagcgaaagatttaaccgggcgataaccgtagaagtggatgtagtctttaatctgaactgctgtcgaatagaaaaaattcaccgtctgacgtggacaaattgcaacgatggaaattagcccaagagcgcataataaagcggtgaatttttttcgactggtgattctcagctgcattggtttcatccctgaatgtcagtgccaaagactgacaataaccaaagcagctatagtacggtgctcaccaccaggcgtggaagtggtgaaccggaccaataccgtgaccaacttccagcgtgtcggcctgggctaacgccgatgaaagccagctttttgcctcctgtacggtgtcagcccagtttgtatggcgcgggcgtagtgcagccaacgccgcagagagtgtacaaccagtgccgtgggtgtttttggtcataatgcgcggtgcggtaaaccgttgttcaccctcgcgggtaaacagccagtccgggctttgctcatcatccagatgaccacctttcattagcactgcgccacatcccatcgccaacagcgatcgcccttgttccagcatttcctgttcggtgcgcgcgtgtggcgcgtcgagcaaggcggcagcttcgggcaagtttggcgttattaatgaaacctgtggcaataatcgactgcgcagcgtaacaaccgccgaaggtgaaagcagcgggtcgccgctttttgccagcataacggtgtcgagtaccacgttttggatctgataacgttgcaaccgttctgccaccgcttcaacaatatcggtttccgccaacataccgattttagtggtgtcgattcgcacatcgctgaacaccgaatcgagctgggcggcgacaaaatcaggctcaatgcgatacaccgactgtacgccacgggtattttgcgntaccagtgcagtaataactgagcaaccataagcgccaagtgccgagaaggttttaagatcggcctgaatccccgcaccaccactcggatcagtaccggcaatcgtcagagcgttaattcgtttcatgcctgcacctcctgcgtcaattgccagagcgcatcaaggaaatgtggancaaaactgcctggcccctcgcttctggcgactgcgcgttctccggcttgtttcatccagtgacaggcagatgcgacattttccagcgtatcgcctggtaacgcacagcaggcagcgacaaccgccgataatgcacagccagttcctaccactttggtcattaacggatcgccaccgtgaatgccaacggtgcgacgaccatcggtaacataatccatctcgccagtgaccacgacgattgcgccagtttcccgtgccagtgtttgtgcagcgggtatcgcattagctgcngcgtcagtggtatccactccccgtccgccagtagcaacgccagctaatgccatgatttccgaagcattaccacgtatcgctgccggtttaaaagataaaagttcatgacaaaaatggcgacgataatcgagcgcaccaaccgctactggatcaagcgtccagggggtttgagagctttttgcttgctcaacggcggcacgcatcgcctgtgcgcgtggctgcgtcagcgtgccaacgttaatcaacaaggcactggcgatagccgcaaactgactggcctcttcggtttcgataaccatcgctggcgatgcaccgatcgccagcaaggtattggcagtaaaggtttgcaccacatcgttggtcatgcaatgcacaagaggggaatgttggtgaaaaaggtgtaacgcgtgcgcagattgcgcggaactcagcaggtcgacttgcatagtttgctcctgccataacgtgaagaagcaatgacctggtggtccgtgacttccctacgctggcattatccagatcaggtgatacgggtatttctcagccttcacgtagaagggcaccccgagtcgtttggttgaatctctatattttgtgccagattaggggaagagacttgcagatgcaagctcgcatccattcattacgtcttcactgtgtaccccatatcagtaatgaaaaagaaacaattcacacccatcattcaggtggtaaaaactgtagactatcttaattagctaatttatnttatttatctaaatttgataggtgagataaaaatgacagaaacccagatctacgagaacattaagcaagccattagcagcgcaccacgaaatagccaaacgatggaaatgcacctccagatgatcaaatacgctgaccatctgaaaaacgtcacggcaaaagagttttgcgaaggtgtaggacttaaagccagctttgctacagagttcagcaaaatgagaaatcttaccgagcgactcaaagccgccggacttgataccacgaagttataacaaacgaaatcatcaatatattactttcgttttccagggttccctgtatatgtacctatgatcataaaaaccagttaccaccacgtagctgataccataatattttcatttttactttaaataaatagataaatttagagagtggaataattaaggtctattttctctagctttttgagattgatagttgagaatgataattctttcatctcaataacaccgaagtttgatagctgtttaagccacagttgaagaccagcatcagagcaacctgctcgatgtgttacatcactacattttattagtgttgatttcctcttatagagataaataaggacttcatagatgcgttttccggtgtcattggatacgcgctataccaccattcttggctaaatcttggttcataatcatactttaattaaaatggatctaaaaattcatcatagatggctggatttttcatagaaaaatatgtttgaacaccatttgatatttttatttattgatcacaggctaacgttcttgaatattctataaatgatgcttcctctattctaactctacccacgcaatatatatacaaccctacctatactcgaagtacgttcaacacataagacaacgaaaagtagttgtgtgctgtaaaanntnnnnnnnttaataattaatttcaagagcatgctgtgccccctatattatgcaaatgnnnnnnnnnaaaannnnataagacacattaaacgattacaataatcaaacatatattaaggtgaatagaaggtattcgaatgagtcatttctaatatttttagtcttacgggcaaaggctatctattacctaacatgcaatggaaagcggaaaagtatgtagatagtgcaacttgttccctgaactgctgtttatccaacctattgctatgaaagtacgtaataatttcaaacctaaacaataccattgctaaacaaatgaaaacttgttcgttttactaattaatagttttataatgactaccccaaaataggtaactcaaatccaagcaaagagaaaatatgaagagtaaaatttttgctgcacttctgctactacctctatctacttatgcaagctcctataaatgtgatgctcttcagcagggtcaaattggcagcaatgggaaaaccgttacggcacaatcctccatcgatattgacggcaaacagatgcattttagcttgaacggagtgagttgggatctctcatatattggtgaaaaacagattgcaaagatgtatagcaccgaaagcgggaacgtctctgtatctttcattgatgccaatcccatcatcttcgtgctacatctcgtaaacgatgatggtagaaaaggcacttacaacatcagtgaatgttctgaattataagaggctaaaatgaaaaaactactcgttaccgtcatctttgtggcaatgatgccaaatgcattcgcactaagtcacggagacagcgcaacacttaaagaaggtacatttaactgtaaaaagttaactgacttttacgagatgatcagttacatccaggacaatgaccaacaggctatgctgagtctcattacatccaataaatgtcgcgtgttagatgaatcaatgacggtagaaatccagagcgtcgatgacaaaggttttgtttcattcataactccaggtggtcatggtggctgggctgtgaagcaatttttcgaaaattaatcaaactataacctcgaatggcgtgtgtcctcacgccatttactctaattcagcttaacgtcacttgtccctcnatttattgcctcaactacggccatattaggcactttcatttgatataagaatccagcaccttcagaacaacatccagatcttcttcacattttagctcatccccctggtgaacgatntgttccgtcagatgacctttaatcacttcccgcatcagaccgtttaccgcgccacggatagcagcaatctgttgtaaaactgcagcgcattcgtgcggttcgtcgagcattttcttgagcgccacgacctggccctgaatcttactggcacgtgctttcagtttctgtttatcacggattgtatgagacatggcaacacctggttaacaagaacatgaaaaatcatagcactattaatctactgggnnnnngtatcaggtactgggggggagtagaatcagattgccgaattaatactaagaattattatcatgaccgaatttacaactcttcttcagcaaggaaacgcctggttcttcatccccagcgccatcttacttggtgcgcttcatggcttggaaccagggcactcaaaaacgatgatnnnngcgtttatcatcgccatcaaaggcaccattaaacaggcggtgatgctcggactggcagcaaccatttcgcataccgcagtggtctggttgattgcctttggcgggatggtgatcagcaagcgctttactgctcaatcagcagaaccgtggctccagttgatttccgcagtgatcattattagcaccgctttctggatgttctggcgtacctggcgcggcgaacgcaactggctggagaatatgcacgagcatgatcatgagcatcatcaccacgatcacgaagatcaccacgaccatggacatcatcaccatcacgaacatggcgagtatcaggatgcccatgcacgagcccatgccaatgacattaaacgacgctttgatggtagagaggtcaccaactggcaaatnntgctatttggcttaaccggtggccttatcccctgcccggcagcaattaccgtgctgttgatttgcattcagttgaaagccctgacactgggcgcaacactggtcgtcagtttcagcattggcctggcgttaacgctggtcaccgtaggcgttggcgcagcaatcagcgttcagcaggtcgcaaaacgctggagcggatttaacactctcgctaaacgcgccccctatttttccagtctgttgattggcttagtcggtgtgtatatgggcgtacatggcttcatgggcataatgcgataactcaatcctttaggcttgcatgttatcttcagcccaggatgattcttaaatcagctatttccgctgactctctgctcgataaggatgcttttagggcatcctttcatttacactttttacgaaatcatgggatcactaacaaaatatcgcttgtcagttatattgtatggcatgaaagatatgcgactgatattacagatccccaaagtggagagtttatgaccattaaaaataagatgttgctgggtgcgcttttgctggttaccagtgccgcctgggccgcaccagccaccgcgggttcgaccaatacctcgggaatttctaagtatgagttaagtagtttcattgctgactttaagcatttcaaaccaggtgataccgtcccagagatgtaccgaaccgatgagtacaacattaagcagtggcagttacgtaacctgcccgcacctgacgccggaacccactggacctatatgggtggcgcgtacgtgttgatcagcgacaccgacggtaaaatcattaaagcctacgacggtgagattttttatcatcgctaaaaaaagccccctcatcatgagggggcaatgcagacaccttgttattttttattattagccacttgctcgtcttgcttgttattagtcgtatttcacgttgattagtgcggttgcctccagtgcgccagatttaactttgtttgtatcgtagacgtagtaactggctgttatcggaattgaaaccgttgtatctgtaagttttgactttgccgcaatttcttttaaatttgtgtatcctttactgctgttagtgatatttaaaagtgtgactggcgaaccattactttcaagaataaatcctacgccattatcttccgcacctttcagtattgtgttgctgttggttaacaagtcagaacttgataaatacacctgcattttccgtgatgtttgattttgttgacctaataaatttttacaacgcagaataatatccccttgtttactatttattgttgctttgttacctgtggctggtaattgtgaaacgggaatgctgtctaaagtaattaataaatcgtccggtttgcaggttgtggttatcgggttgtatgacaatgtcagattaaaggaatagacacctgcattttgtgccaatgcatttctgtagctatttacacatgcatcccatgacttgccacctaataaacacagtagaaattgtactgcggcactcccgcgtgtcgatgatgaagcactggataatgtcgcaacaccattaatcatcactgaaccgccgccccccgcagaaacattcacttttgcattactggccgcaggtgtcaccgttaccgaataaccactggtgaaactggtctgattatttgacaacgtgatgttatttttattggtccattcaaaangtaaatttaatttaatagtatcgttataaagtccaacaataatatccgacgggctcataggggtgatagtatttgtactcacgcatgacgaatcattaaaattatgctcataggtcgccatttgtgtttgagtaagtgcaaaatccccctgaacaaccaaattgtgctgaacagataactcactataacatgctgcatagctcactggcataaccatcatcattaatataaatagcattatgcgaattttcatagaaccacctgactattactggcaaatataatttctactttcatcaatctctttaccgaaggtgattgtgcatgaaagtccttgttgcttattaattgccacattaaccgatggcggtacttcattggtgcgaataaataactgacttccctggccgacaacgccaatattatgaccgtggatatcattgacttcataaccaaacgttaatggttgcccatccgctcttaacgcttttataaaccagggcttgcgctgatcggtatcaaaattaaccagtacaaccgcgccgcgataaggtgcggcaattttccggttaccgcgcaattctgcttcgctatcgctttgcgacacatccagcatcaggtgattttcccgataaggtgtcattccgtcgtataccaccactccattacggtttgttgtgcgatatttttgcccattgacataagcatctttaattcctggcgcattcatcacagcaaacgtttcggaaagacggttcgccagattaacgccacccgaccaggcgacaatgccccctgaaacactggctccagcctgtcgataagtactcgactgactataactgccattcactgtcgcaaccggcgcgttccaggttaaattcgctccagctgtcgtttcatttccctgatgttgatgacttaggttgacaccataattgaactgatcccgactccctactgttcctgataatcccgtattatttgaggcaaacccctgatcatcaaacgtcgttgagttagacatatatatttgccgacgaggcgtcgaaacgtcatcaccccaatcaaagggaatcgatataaaaatattaaaacgtttctcttcatgatgattctcgtcataagcctggcttgccgcgagggtatagcttatccgtcgcaggttgttggaataactcaactgataatccttactactgccgctacgcccccagtaatctcgccataacgtacttaatgacacagaaccccaaccttctggcaatgactggctcatattggcggaaaagctatttttnngnncaaaatcattctggtaataatcggcaatgtcatagacatcgttttcatcacggcgataattatctttattgttagcccaaacgtgatcattaaatgtccgataatcacgcgacgaataacgctaggccgccagaccaaaacgcgtcgacgtttggctcacaaatttgttgtaggcaatttgataactttgcccgtcaaatacatcgccgttgtcttgtttactatgcgacttcgtggcatcgacggaaatggcaccaatgcgtgtattccagccagtccccaaagtgaacgcgtaataattattcgcgaccatcgagccaccatacagcgtcaataagttattaaaaccatactgataacccgcctggacaaaatcactttgtttgctcgccccttcaatatggctacgacccgccgcaaaatcatatttcgacacgccgggttgcagcatatttggcaccgctgcataaggcaccagataggtggttaccgagccgtcagcctctttcacgctaacatcaagatctgctccaccaccggccaactgcaaatctgtaatcgcaaacgggccaggaggagcctctttctgataaaccacaaaaccattctgttcaatagttaccagcgcgttactctgagcaatcccctgcacccgtggcgtaaaattttgtttcgagttaggcaacatctgcatatcacgaaacaaccgcacacctctgaagcgaacagaatcaaaaatatcgcttgatgtgtacatatcacccacgcgaagcgtgccgagaagttgggcaaatccacattccagatacagggtattgcttttccacacccctggattgttatttgttttactgaaactggcatcagaatgcagttgccaccccagtaaatttaacccnnttttaaaacgtacatatgtactcttactattacccgacgctttatagtcactgtaatactgactcacataataagaggtataaaacgcattaataccccgctcccagttttccggtggaacatagccactttccagttcttccacccaggcctgcgggacactgaaatcgagacgaaaaaccccgatatcccaggtatagctcccaccctgaacaagttgctcaaatgttaaacattgcttaccgctggcgaagttatcgctattaatgcctaaccgcttgataacttctcttgataaacatgtttcttgcgggttgtctttaacaataatctcatatttcccgcgccattgcttattgacataaatatcgatgtcatactgccccggtaagggttgattatcatcaagacgaatatttgcaacctgctggtctttcattccacctatcataaaatgggtatcaaaggtttcttcagctgcataagcttcaatgccgagcaataacgctacgattgctgatgcaagtggggtcattctcaacataggcagctcctgcaattaaattttgtcactaatatagttgccgtggtcatcgataatggtcagataccagttatttgcattattacttttgacattaacactctgactttctaagggggcaatcataatagtttcataattgactttaacattattagctttgacatccgaaatcgtcacccaattagctgagtcatttttttatcaccaatccattgccactgcgatttaccagtaactttttaaaggtcgctttatttaccggagcaatacccgccggccggtaaataatttgattctgttttgcatcgcaaacttcagtgcattcttaccttcttgttctggactatttggtggaatatccagaacattcagataaaaaatgctttctttattagtgggcagtttattcggcataattntgatttttacttgctgcccggaatttgcccctatttttgccactggtggcgttaacatgaaaggaacctgaattttttctggtggtaacgacgtatcgccatcatcaatccacgcctgcagcagcgaagaacggtttccctggttcatcaactgcaccataacttctttattttctgccgggtaaataatgcgcgtcccgtagataacaattccggcatgtgcaggaaggaccatagaaaaaatgagtaaagataataatcctttcatcttaatgcctcttaaattaaaaagccgccatggggatagcggccatgtttattacctggagaaacttgcaattttatttattaatcctgcnccacacgcataaccagagaagataatacatcacctgattgcactgagttatctgtcagtttcaggtattttgctttaaacggaatagcatattgaccttccgctgttttataactctcaatattaaaaggtgcagaaacatccaggacatcgctgttatcacctaaatagagatagtaacccacagtatcgttgctactggctatcgccttatcgttaccagttattttatcgttggtaatcaacgagagttttacaccagcaacttctttcgggcagctaatttttaacatgctgctggttacaccgactgcatcatcataggtagaatatttagctttaccttcaaagacagtggttggtacagtcggcatattaatacttactgaatcaccacccgcttcgaatttacacggagattctgcaatattccctttaatagttaatgttccggtatcaacgtctgcagcaaatactccagcgctcataaaaaaagaagaaaagacagcgacagcaataattgaacgtttcataatatgttccttnntaaaatttatttttggttgttaagagtctgtatctcttggaaacaaatttctcacatcaaaaaagttgccgcaatgtaaacatattgttttattgatttaaaacaaattaaccattgcaatataaatacaacaaatacttaatagtannaaatannnatcgcatctattaattaatgtagatttatgtaaatggcattgttgatnnnannaaaaaaanncgaaatcatttatataaatgatttcggctttctaaatgcaattaaaatcaggttgccaaattaatcgtagcgatttaacacgattcgacgtttgctatcactacctgcaacaaccacttctgtcgttacacctttgacgggcgaagaaacctgatgacgggtatcgacattatacgttaactgaccacaatgctgttgaggttgactattaaccatagccatactgcatgttgggggactgatcctgccattaatcgttaatgtggcagtctctgaagagaacgcgggagaagccaatccataggcaagaaaaataattcctgacagccaatacttattcattgaacgttatccctgtagtaaaggttatgcctggatagaatgagtgcataacaaactatagctgtacatccactacacagcacgaaggatgataatgaagcattgcctgtacgatcaatcgactttgtagagtttcggacgaaggtccgcagaatattcgcagtattaaataagtgttcattaatgcggcaaaaacaaatacaccgcatcaatgtaacatctctgcggtgtatgaagaatcaccagaatggttaataggcgttagaccgcgcggaaggaaatctcgcctggaatgacttcaccctgccagtagagctgagctgcaacgcggtcagccagctggcggtagatagcggtaaattcgctctccggacggctgataaccgttggcgtgcctttatcgagatcctcacgtaaggaaatatgtaacggcatctgccccagcagttgtgtgtggtatttntctgccagtttctctgcaccaccggtaccaaaaatcggttcatggtgaccacagttactgcaaatatgcacactcatgttctcgacaataccgagcaccggaacctcgactttctcgaacatcacaatgccttttttcgcatcgatcaacgcgatgtcctgcggggtggtgaccacgactgcaccagttactggaatgttttgcgccagcgtcaattgaatgtcaccggtgcctggcggcatatcaagcaccagatagtcgagatccggccacaaggtttcctgcaacatctgcattaacgccttgctcgccatcggtccacgccacaccatcgcattgtcgtcagtgaccagataaccaattgaattggttgccaggccatgagacataatcggtgccatatgggtaccgtccggcgaagttggacgnnnnnnntctgcgcccagcatggtgggaattgatgggccgtagatatcggcgtccagaatgccgactttcgccccttccgccgccagtgccagcgccaggtttaccgccgtggaggatttacccacgnnnnctttaccggaactgaccgcaatgatgttcttcacgccattaatacccggctgattcttcacgcgttttaaggtggcgatattgtgcgacagtttccagtcgatagctttcgccccggtgatacgcagcagttcggcgctacattgctcttttaactcttcaaacgcgctatgccagacgaatggcataaccagttccacatgcaacgtgtcgtccatccaggcgacatggtgcaacgctttcagcgtggtgaggttatgcttcagggttgggtgctgaaaattggccagtgtcccggcgaccattgcgcgcaaggcttctggtgatttggcctgggattgttcgttcatcccgactccttttttgtatagataaaccatcagctgatagtttacctgaagaatatagagaagtacttacttaacattttcccatttggtactatctaaccccttttcactattaagaagtaatgcctactatgactcaagtcgcgaagaaaattctggtgacgtgcncactgccgtacgctaacggctcaatccacctcggccatatgctggagcacatccaggctgatgtctgggtccgttaccagcgaatgcgcggccacgaggtcaacttcatctgcgccgacgatgcccacggtacaccgatcatgctgaaagctcagcagcttggtatcaccccggagcagatgattggcgaaatgagtcaggagcatcagactgatttcgcaggctttaacatcagctatgacaactatcactcgacgcacagcgaagagaaccgccagttgtctgagcttatctatactcgcctgaaagaaaacggttttattaaaaaccgcaccatctctcagctgtacgatccggaaaaaggcatgttcctgccggaccgttttgtgaaaggcacctgcccgaaatgtaaatccccggatcaatacggcgataactgcgaagtctgcggcgcgacctacagcccgactgaantgatcgagccgaaatcggtggtttctggcgctacgccggtaatgcgtgattctgaacacttcttctttgatctgccctctttcagcgaaatgttgcaggcatggacccgcagcggtgcgttgcaggagcaggtggcaaataaaatgcaggagtggtttgaatccggcctgcaacagtgggatatctcccgcgacgcgccgtacttcggttttgaaattccgaacgcgccgggtaaatatttctacgtctggctagatgcgccgattggctatatgggttctttcaagaatctgtgcgacaagcgcggcgacagcgtaagcttcgatgaatactggaagaaagactccaccgccgagctgtaccacttcatcggtaaagatattgtttacttccacagcctgttctggcctgcaatgctggaaggcagcaacttccgcaagccgaccaacttgtttgttcacggctatgtgacagtgaacggtgcgaagatgtccaagtctcgcggtacctttattaaagccagcacctggctgaatcattttgacgccgacagcctgcgttactactacactgcgaaactctcttcgcgcattgatgatatcgatctcaacctggaagatttcgttcagcgcgtgaatgccgatatcgttaacaaagtggttaacctggcctctcgtaatgcgggctttatcaacaagcgttttgacggcgtgctggcaagcgaactggctgacccgcagttgtacaaaaccttcactgatgccgctgaagtgattggtgaagcgtgggaaagccgcgaatttggtaaagcagtacgcgaaattatggcgctggctgatctggctaaccgctatgtcgatgaacaggctccgtgggtggtggcgaaacaggaaggccgcgatgccgacctgcaggcnatttgctcgatgggcatcaacctgttccgcgtgctgatgacctacctgaaaccggtactgccgaaactgactgnnnnnncagaagcattcctcaatacagaactgacctgggatggtatccagcaaccgctgttgggccataaagtgaatccgtttaaggcgctgtataaccgcatcgatatgaaacaggttgaagcactggtggaagcatctaaagaagaagtgaaagccgctgccgcgccggtaactggcccgctggcagacgatccgattcaggaaaccatcacctttgacgacttcgctaaagttgacctgcgcgtggcgctgattgaaaacgcagagtttgttgaaggttctgacaaactgctgcgcctgacgctggatctcggcggtgaaaaacgcaatgtcttctccggcattcgttctgcctacccggatccgcaggcactgattggtcgtcacaccattatggtggctaacctggcaccacgtaaaatgcgcttcggtatctctgaaggcatggtgatggctgccggtcctggcgggaaagatattttcctgctaagcccggatgccggtgctaaaccgggtcatcaggtgaaataatctcctttcaaggcgctgtatcgacagcgccttttctttataaattcctaaagttgttttcttgcgattttgtctctctctaacccgcataaatactggtagcatctgcattcaactggataaaattacagggatgcagaatgagacactttatctatcaggacgaaaaatcacataaattctgggcggttgagcagcagggaaacgagctgcatatcaactggggcaaagtcggcactaacgggcaaagccagataaaaagttttgcggatgctgcggcagcggcaaaagcggagcttaagctgatcgcagagaaaacgaaaaaaggctatgtggaaaatgcttcagcaaacgtgcatatcccccccattaccaaagccactcctgaagttgaaacttcccctgagagtaaaaaccaacgcccctggctggctgatgatgcggtcatcggctaactgacgatattaatcgatttgcttttcctcatcgctctcgccccagagagatcaattatctgcgcaaagacggtgagatatggaagcgtattgcagataacactagggcatatgatcccgacaacaattaccgctcttatccagaaaactggcagcaggcttttgctgagttacaaatgcgagttcagggtaatcaacagacaggaagtgcgcaatctgatgcggcattgctctggagtttctggaactcttactctacagatgaactggtcgatgacttagtcattcgctgtggtctggaaagtgccgttgaaatcgcccttctcgctcttcaacttagatataaaccagtaaaaggcgcagtaaccaccaccattccacctaatcacaaagcagaatcgctacctagttggcatcaacgtctatgtcatcatctttcactcgcttcagaagatgagtggcaacgctgtgtagataaagtactcgcggctattccctcgctatccccagcacgggaaccttttgcggcgttactgctccctgaacgcccggatattgccaatgctatggcgctacgttatgcagaccaaaacgttccggcgatcacctggttaagtatgatggtaagcgatgatgttgccctggccatccaggaaaaatatggtttcccaccgctatataatgatttccgcaaatatctggctacgttgctggcaaataatggaatgcgtggtgtaagccggattcttctcaagctacctgtcgactatcccgtaaaatacacggaccttttcactcacatacacgccaatgctgaagatcttgtcaaatggctatggaaaacgaatcacccggatgcgattcaaattctgatcctcggtgtaaatggcaagaaaaagcacctggaatacttaagcaaagcctgccaaaaacatcccgctgcggctattgccgcttatgctactttgctggcaatacatgaanataatgagtggcgtaaagcgcttgtcaaactgattnnnnnnnnnnnnnnnnnnnnnnnnnnnnnnnnnnnnnnnnnnnnnnnattgccgcttatgctactttgctggcaatacatgaaaataatnngtgnngtaaagcgcttgtcaaactgattactgccacgccagagttagtatgcgaggtcattccctgggttaatgctaaggcggcaggcatcttatctgaatgtcgtccgctgccagtagctgaagaatgtgaatatgccactgtggatatgttgccggagctgcttgtcgctccaccgtgggtaataaataagaaaaagaatgtcatacccgtatttgatttaccggtacttcccattcctgccgtcacggatatcacaccaggaattacagagttaatcagtcatactgacatatccagattcagtgaaatcgcgcaatatcaggcatcacagcaaaccttatttaccgatctgccactaattgaaaaagaaagctgggagacatctttcattccttttacaccagaacaacaaatcctttggcaattaggttttaatgaatggctgcattgcgaaaatgacttacatgaaaanaaatatataccgcaaagcgctgttgatgccttgttacgctttgattttccagcactaaaagctgagtttgcgaaatatcacaacaatgccaacaaaagctggaatctatctgcgctttgttacttaccgggacaacaggcgatttcatttctcaaccaaataatcattgaggagcgatattcaggtgagaaagagattctggcggtttttggtagtacggccattcctgcgtttatgacctgcttgcaacgagatcatcaacgcctgtggatattcaccctttttattggagccagtgaactagccttaccaatggcgcagcggttacagaaaaaaatagcttacaaggatgccgttaattggctggcaaataacccgcgccatgccgccgccgggctactgcctttggcgctgggcaaaccgtgccaaaatcgggaatatgcccgccaggcactcctcctgctagtgaaattaaaccagcgagaaacgattgaggaaatcgcccaatgatataatcaacctgatgttttagctgcgctggcaacattatttgatagcgacccactggaagaatatcctgcaaaaatcgccccactgcccggcttttatcagttccccttatggcgcagacctcggcttaaaagtaacaacctgcctctgccagatgacgctatgcgccacctcggcacaatgttgagctttccacgcgacattacctcctacgctgggctggcgatcatcaaagagaccttcacccgcgaatcactggctgactttggctgggatctctacacggcatggacagaagcaggcgcacccgcaaaagagaactgggcatttacctcgctggggattctaggcaatgacaacaccgcgcgtaaactaaccccgctcatccgcgcctggccgggtgaatcccagcataaacgcncggtttacgggctggatgtgttagccagtatcggtagcgacattgcgcttatgttgcttaatggcattgcgcaaaagattaaattcgttgcattacaggaacatgccagcgacagaatcaatatggtcgccgaaaatcgcggactgacaatggccgaactggaagatcgcctggcgccggatttagggcttgatagcagtggctcgctgatactggatttcggcccccgcaaattcaccgttggttttgacgaaaccttaaaacctgtagtgtgcgatgcaaacggcaaagtcctgaaagatttacctaagccaaaccagagcgatgataaaacactggcaactgacgcagttaatctcttcaaacagttgaaaaaagatgttcgtgctatcgccagccagcaaattacccgtctggaacaggctatgtgccagcgcagacgctggacggcagagcagttccgcctgtttctggtggagcatccgctggtacgtcacttaacccgacggctgttatggggggtttataacgatgaaaacgcccttatcacctgttttcgcgtggcagaagacagcacttacagcgatgcgcaggatgagttattcacgctgccagcaggaaacatcggtataccgcatgtgctggaaatcccccctgaatccgccgctgcattcaggcaaatttacgttgattacgaactgcttccccctttccaacagctcgaacgtggtagttaccaccttgctgataacgaacgtaatgtccatgaattgtcacgctggaacggacgtctctgccaggccggacgcattgtcgggctggaacgcagaggctggcaacgtctggaagaaagcggcagcgtctatgtgatgcgcaaatctaccccttatggtgctctcgaacttgaaacagaacctttttcattaatttatggcgaaacggggtatagcgacctgctgcctgtcgaaagcgtaaaaatcaccgccccttatgatcgctatggtaaacaatcctcacccactttctccgtgctcgacgacatcaccgccagcgagctgattaacgacattgaatcactgtttgattaaaaggatttagcaatgaaaacctatatttatcaggacgaaaaatcacataaattctgggcggtggagcagcagagaaacgagatgcatatcaactggggcaaagtcggcactaacgggcaaagtcaggtaaaaagctttgctgatgctgcggcggcagaaaaagcggaactgaagctgattgcggagaaggtgaagaaggggtatgtggagcaagtagacgctaacgctcactcacatgatgtctcagcaaagaaagtcctggtcacagaggaaaaagcctcaataaatcaccaggcagcaactaatggtttaccctggctggcagacaacgatcacattattcttcccccgaatattgcccgccatgccctcagccaccgcctttggccgggagagccagtaaaaaaaccaaccaaacccgagaaacaaaatttaatttcccgattggcaaatcgtacttatcattattataaaaatctgactttcgattacagctcatgctctgatgaatgggctgatgcgattagccaggcaatcagcttaattaaggcccaaaagactgagatacccgcgcgtactntggcggtacttacttttctggaaatatgtttttgtcagggctggaatgatgaaacctcatccgagttgctggatgaaattgtaagcaccttcggtatcgaatacgcaactgaaactgtcatcttctggtggcaaattgatttcgattttgactataaagatgaacatttgactttctttattaattatgcagatagcagcaaggacagttatagaaggaataacgacaaatttagtttacgtctgcgtaaacatttatcactagcagaagaagaagtatggcaaaattgcattgcaaaattactcgttgcgttaccagatatatcactctatcgccaaccgttaattgccattttaatgccagaaatacccgaagtggcccatgagatcgtacatcgtttacaccaggtcgcagatgttccacaacttgaaatgttgaaactggtagcgacagatccattcacgctcgaaatactggagaactatcaatacattgatgtatttaacacctatggtgccagttggtcagctacggtattacgggaacaaggtatagcggcactggctcgcctggcttcctatgctgaagaagataattgcggtgacgtactgaaatgtattaatcatccgttggccattacggcactcatcgaagccgccgatactaataaacgctgttatgaacgactaataaaaaatgccgaaaattttccttctgccacgatagcggcattagccgaagcattggtaaaaaaagatgataaacgcaaacatacgttgctggtttcattacttaatgcaaatcctttattggtcgaaaaattagtcatcggattatcgtcgcaagcggcaaatttatngcaacaatgtcagcaattgctgaatagtcgcaatgaagattttgcaaactcagaaattctaccaatggtactagtctcgccgccctgggaaactcaaaataaaaataacgacaacagtcctgtgggtaaatacccggcgaaaatcccccctttaccgttgttttatcaacctccattatggactcgcccaaaactcaaaaatagcagcaaggtactgccagataacgccctcctccacctcggtgaaatgctccgcttccctcaggaagaggcgctgtatccgggattattgcaggtgaaagatgcctgtaccgccgactcactggctgaatttgcctgggatctgtttaccgcctggctgactacgggtgcaccatcgaaagaaagctgggcgttcactgcgttaggtgttctcggtaacgacgacaccgctcgcaaactgacgccattaatacgcgcctggcctggcgaatctcagcataaacgcgccaccgttgggttggatattctcgccgctatcggtagtgatatcgctctgatgcagcttaacggcattgctcagaaactgaaattcaaagctttacaggagcgggcgaaagagaaaattgccgacattgctgaaagtcgcgaactgacagtggaggagcttgaagatcggttagcaccggatctcagtctggatgataacggttcgttgctgctggatttcggcccacgccagttcaccgtcagctttgatgaaaccttaaaactgtttgtgcgtgacgcttccggcagccgtctgaaagacctgcccaaaccaaacaaaagcgatgatgaatcacaggcgaacgatgctgttaaccgctacaaactactgaaaaaagatgcgcgtaccgtcgccgcccagcaggtagcaaggttggaatccgccatgtgcctgcgtcgccgctggtcgccagaaaactttcagctcttcctggttgaacatccactggtacgccacttaacccgccgtctgatttggggcgtttatagcaccgaaaaccagctactgacgtgcttccgcgtggcggaagataacagctacagcaccgctgacgatgatcttttcaccctgccggaaggcgatatctctgttggcattcctcacgttctggaaatatcaccgacggatgctgccgcctttggtcagctttttgccgactatgaactgctaccaccgttccgtcagcttgaccgtaacagttacgccntgacagaagccgagcgcaacgccagcgaantgacccgctgggcaggcagaaaatgcccgagcggtcgggtcatggggctggcgaataaaggctggataaagggcaccccgcaggatggaggctggatcggctggatgatcaaacctctgggccgctggtcgttaatcatggaaatcgatgaaggttttgcggtaggcatgtcgccagccgaactgagtgccgagcaaatcttaagcaagctgtggctatgggaaggcancgcagaaagctatggctgggggagtaattcaacacaggaagcgcagttctccgtactcgatgccatcaccgccagcgagataattaacgatattgaagccctgtttgaataaggaaagagcatggacaaggaattaccgtggctggcggataacgcccaactggaactgaaatataaaaaaggcaaaacgccgctcagtcatcgtcgctggccgggcgaaccagtgtccgttatcactggaagtctcatccagacattgggagatgaattactacaacaagcaggccagaaggaaaatatcacctggaattatgataaatgctcactggagtggcagtccgccatccagcaggcaatcaatttgactggcgagcataaaccgtcaatcccagcccttaccatggcggctctgatctgtatcgcgcaaaatgacagccagcagttacttgatgaaatcgtgcaacaagaggggctggaatatgcgacggatgtagtgatatcgcgtcagtgcattgcgcggcgttatgagagtgactcactggtcgtcactttgcagtatcaggacgaggactatggctacggttatggctccgcgacctataacgatttcgatctccgtttgcgtaagcatctgtcgctggcagaggaaagttgctggcagcgttgtgccgataaactcattgccgcactgccaggaatacccaaaattcgccgtccttttattgcgctgatcctcccggaaaagcctgaaatagccaatgaactcgccagtcttgaaagctcccggtcaagtctccattcaaaggagtggttaaaggtcgttgctactgataatacggcggtaaaaaaactcgaacgatactggggcctggacgtatttagcgatcgcgaagccagctacatgtcacaaaaaaaccacttcggctacgcggcctgcgcngccnntttgcnnaaacaaggactggcagccattccgcgcctcgcgatgtatgcccataaagaagattgcggcagtcngttnntnnaaannnnccatccgcaggtcatccacaccttgctactggtggctgataaaaacaaacccagcctgcaacgtgtggctaaatacagtaaaaacttccnnnncgcgacgctcgcggcactggcagaactgctggcgtnaanagannnnnnnnnnnnncctggttatccaatcatcgaagacaaaaagctgcctgcccagcaaaaagcacgcgatgaatactggcgtacgctgttacaaacgctgatggcatcgcagccacaactggcagaagaggtgatgcagtggttaagtactcaagcccgggcagtactgaatagttatttattggcaccgcccaaaccggttattgatggcnnnnnnnnnnnnnnnnnnnnnnnnnnnnnnnnnnnnnnnncnntaaagaagattgcggcagtctgttggtacaaattaaccatccgcaggtcatccnnaccttnnnnnnnnnnnnnnnnnnnnnnnnnnnnnnnnnnnnnnnnnnnnnnnnnnncaaacccagcnngcnncgtgtggnnnnnnnnnnnnnnnnnnnnnncnncgcnncgctcgcggcactgnnagaacnnctggcgttaaaannnccaccagcccgccctggttatccaatcatcgaagacaaaaagctgccnnnnnnnnnnnnnnnnnnnnnnnnnnnnnnnnnnnnnnnnnnnnnnnnnnnnnnnnnnnnnnnnnnnnacgctgntggcatcgcagccacannnnnnnnnnnnnnnnnnnnnnnnnnnnnnnnnnnnnnnnnnnnnnnnnnnnnnnnnnnnnnnnnnnnnnnnnnnnnnnnnnnnnnccggttattgatggcaccgataacagcaatctgcctgaaatcctcgtttcaccaccgtggcgtagtaagaaaaaaatgacagctccacgtcttgatttggcaccgctcgaattaaccccgcaagtttactggcaaccaggcgaacaagagaggcttgcctccactgagtctgcccgttatttcagcacggaatctcttgcgcaacgcatggaacaaaaaagtggacgagttgtattacaggaactgggttttggggatgatgtatggctgtttctgaattatatactccccggaaaactggatgctgcacgcaattcactcattgttcagtggcattactaccaggggcgggttgaagagatcctgaatggctggaactccccggaagcacaattagcagaacaggcgctccgcagcggtcacatagaagcgttaattaacatatgggaaaatgacaactactcacgttatcgtccggaaaagagtgtctggaacctgtatttattggcacagttgccgcgtgagatggctttgaccttctggctgcgtatcaatgagaaaaaacatctgttcgcgggtgaggactattttctcagtatcctcgggttggatgcgctaccaggtctgatgttggctttttcacatcgtccaaaagaaacatttccgttaattttaaattttggcgcaacagaactggccctgcccgttgcccgcgtctggcgacgtttcgcggtgcagcgtgatctggctcnccagtggattttacaatggccggaacatacggctactgcacttatccctcttgtctttaccaaacccagcgataatagcgaagccgcattacttgccctgcgtttactgtacgaacagggacatggcgagttgctgcaaaccgtggcaaaccgctggcaacgcgctgatgtatggcctgccctggagcagttgcttaaacagggtccaatggacatttacccggcacgcattccaaaagcccctgatttctggcatccggcaatgtggcccaggccgcgacttatcactaataatcagcctgttaccgatgacgctctggaaattatcggcgaaatgctgcgctttacccaggggggacgtttttatagcgggctggaacaactgaaaacgttctgccagccacaaacgctggccgcttttgcctgggatctcttcactgcgtggcaacaagctggtgcccccgcaaaagacaactgggcatttctggcgttaagtctctttggtgacgaaagcacggctcgggatctgacgacacagatcctcgcctggccacaagaaggcaaatctgcccgtgctgtcattggtctgaatatacttaccttgatgaataatgatatggcgctgatacagctgcatcatgtatcacaacgggcgaaatcctcttcattacgtgaaaacgcagcggaatttcttcaggtggtcgcagaaaatcgcgggctaagccaggaagagctagcggacagattagtcccaaccctggaccttgatgatccgcaggcgttaagttttgattttggtccccggcattttaccgttcgcttcgatgaaaaccttaacccggttatctttgatcagcaaaacgttcgccagaaaagcgttccccggttgcgcgccgatgacgatcaactgaaagcgcccgaggcactggcccgactaaaagggctaaaaaaagatgctactcaggtgagcaaaaacctgctcccgcgtcttgaagctgccctacgtaccacccgacgctggtcgctggcagattttcattctctgtttgttaatcatccccttacccgcctggttacccagcgattaatatggggggtttatccggcaaatgaaccgcgtcgtttactcaacgcctttcgtgtggccgcagagggggagttctgcaatgcgnnnnatgagcccattgaccttcctgcggatgctctgattggcattgcccacccgttagaaatggcagcagaaatgcgcagtgaatttgcacagctttttgccgattacgaaattatgccgccttttcgccagttgtcgcgccgcacggtgctgctcacacctgacgagtcaaccagtaacagcctgactcgctgggaaggtaaatccgctnn
